(19) United States
(12) Patent Application Publication
(10) Pub. No.: US 2024/0352131 A1
(43) Pub. Date: Oct. 24, 2024

(54) METHODS OF TREATING EYE DISEASE

(71) Applicant: TrueBinding, Inc., Foster City, CA (US)

(72) Inventors: Dongxu Sun, Palo Alto, CA (US); Suhail Rasool, Foster City, CA (US); Barbara Rangel da Silva, Belmont, CA (US)

(21) Appl. No.: 18/637,068

(22) Filed: Apr. 16, 2024

Related U.S. Application Data
(60) Provisional application No. 63/496,917, filed on Apr. 18, 2023.

(51) Int. Cl. C07K 16/28; A61K 9/00; A61K 39/00; A61P 27/02; A61P 27/12

(52) U.S. Cl. CPC C07K 16/2851; A61K 9/0048; A61P 27/02; A61P 27/12; A61K 2039/505; C07K 2317/565

(57) ABSTRACT

Provided herein are anti-Gal3 antibodies and methods of use thereof. Such methods include therapies for treating one or more eye diseases including, but not limited to, dry eye disease, glaucoma, age-related macular degeneration, microvascular dysfunction, cataracts, retinal drusen, tear dysfunction, corneal sensitivity, diabetic retinopathy, ocular surface diseases, and other eye diseases.

### INCORPORATION BY REFERENCE TO ANY PRIORITY APPLICATIONS

[0001] Any and all applications for which a foreign or domestic priority claim is identified in the Application Data Sheet as filed with the present application are hereby incorporated by reference under 37 CFR 1.57.

### REFERENCE TO SEQUENCE LISTING

[0002] The present application is being filed along with a Sequence Listing in electronic format. The Sequence Listing is provided as a file entitled IMMUT043ASEQLIST.XML, which was created and last modified on Apr. 9, 2024, which is 2,982,948 bytes in size. The information in the electronic Sequence Listing is hereby incorporated by reference in its entirety.

### FIELD

[0003] Aspects of the present disclosure relate generally to therapies related to eye disease involving the use of antibodies that bind to Gal-3.

### BACKGROUND

[0004] Galectin-3 (Gal3, GAL3) is a lectin, or a carbohydrate-binding protein, with specificity towards beta-galactosides. In human cells, Gal3 is expressed and can be found in the nucleus, cytoplasm, cell surface, and in the extracellular space. Gal3 recognizes and interacts with beta-galactose conjugates on various proteins.

### SUMMARY

[0005] Some embodiments provided herein are described by way of the following provided embodiments and also provided as possible combinations or overlapping embodiments:

[0006] In some embodiments, a method of treating microglia mediated inflammation in a subject in need thereof is disclosed. In some embodiments, the method comprises: identifying a subject as having or at risk of having microglia mediated inflammation, and administering a therapeutically effective amount of an anti-Gal3 antibody to the subject, wherein administration of the antibody to the subject alleviates one or more symptoms of microglia mediated inflammation.

[0007] In some embodiments, a method of treating one or more diseases associated with microglia mediated inflammation in a subject in need thereof id disclosed. In some embodiments, the method comprises: identifying a subject as having or at risk of having one or more diseases associated with microglia mediated inflammation, and administering a therapeutically effective amount of an anti-Gal3 antibody to the subject, wherein administration of the antibody to the subject's eye alleviates one or more symptoms of a disease microglia mediated inflammation, is provided.

[0008] In some embodiments, a method of treating an ocular surface disease in a subject in need thereof is disclosed. In some embodiments, the method comprises: identifying a subject as having or at risk of having an ocular surface disease, and administering a therapeutically effective amount of an anti-Gal3 antibody to the subject, wherein administration of the antibody to the subject alleviates one or more symptoms of ocular surface disease.

[0009] In some embodiments, a method of treating macular degeneration in a subject in need thereof is disclosed. In some embodiments, the method comprises: identifying a subject as having or at risk of having macular degeneration, and administering a therapeutically effective amount of an anti-Gal3 antibody to the subject, wherein administration of the antibody to the subject alleviates one or more symptoms of macular degeneration, is provided.

[0010] In some embodiments, a method of treating dry eye disease in a subject in need thereof is disclosed. In some embodiments, the method comprises: identifying a subject as having or at risk of having dry eye disease, and administering a therapeutically effective amount of an anti-Gal3 antibody to the subject, wherein administration of the antibody to the subject alleviates one or more symptoms of dry eye disease, is provided.

[0011] In some embodiments, a method of age-related vascular dysfunction in a subject in need thereof is disclosed. In some embodiments, the method comprises: identifying a subject as having or at risk of having age-related vascular dysfunction, and administering a therapeutically effective amount of an anti-Gal3 antibody to the subject, wherein administration of the antibody to the subject alleviates one or more symptoms of age-related vascular dysfunction, is provided.

[0012] In some embodiments, a method of increasing tear formation in a subject in need thereof is disclosed. In some embodiments, the method comprises: identifying a subject as likely to benefit from increased tear production, administering a therapeutically effective amount of an anti-Gal3 antibody to the subject, wherein administration of the anti-Gal3 antibody to the subject increases tear production in the subject as compared to tear production in the subject prior to administration of the antibody, is provided.

[0013] In some embodiments, a method of decreasing corneal sensitivity in a subject is disclosed. In some embodiments, the method comprises: administering a therapeutically effective amount of an anti-Gal3 antibody to the subject, wherein administration of the anti-Gal3 antibody to the subject's eye decreases corneal sensitivity in the subject as corneal sensitivity in the subject prior to administration of the antibody, is provided.

[0014] In some embodiments, a method of treating cataracts in a subject in need thereof is disclosed. In some embodiments, the method comprises: identifying a subject as having or at risk of having cataracts, and administering a therapeutically effective amount of an anti-Gal3 antibody to the subject, wherein administration of the antibody to the subject reduces the severity of the subject's cataracts as compared to the severity of cataracts in the subjects prior to administration of the anti-Gal3 antibody, is provided.

[0015] In some embodiments, a method of preventing or reducing cataract formation in a subject in need thereof is disclosed. In some embodiments, the method comprises: identifying a subject as having or at risk of having cataracts, and administering a therapeutically effective amount of an anti-Gal3 antibody to the subject, wherein administration of the antibody to the subject reduces or prevents cataract formation in the subject acts as compared to formation of cataracts in the subjects prior to administration of the anti-Gal3 antibody, is provided.

[0016] In some embodiments, a method of treating diabetic retinopathy in a subject in need thereof is disclosed. In some embodiments, the method comprises: identifying a subject as having or at risk of having diabetic retinopathy, and administering a therapeutically effective amount of an anti-Gal3 antibody to the subject, wherein administration of the antibody to the subject alleviates one or more symptoms of diabetic retinopathy, is provided.

[0017] In some embodiments, a method of treating retinal drusen in a subject in need thereof is disclosed. In some embodiments, the method comprises: identifying a subject as having or at risk of having retinal drusen, and administering a therapeutically effective amount of an anti-Gal3 antibody to the subject, wherein administration of the antibody to the subject reduces retinal drusen in the subject as compared to retinal drusen in the subject prior to administration of the anti-Gal3 antibody, is provided.

### BRIEF DESCRIPTION OF THE DRAWINGS

[0018] FIG. 1 is a flowchart depicting some embodiments of a method of treating microglia mediated inflammation.

[0019] FIG. 2 is a flowchart depicting some embodiments of a method of treating one or more diseases associated with microglia mediated inflammation.

[0020] FIG. 3 is a flowchart depicting some embodiments of a method of treating an ocular surface disease.

[0021] FIG. 4 is a flowchart depicting some embodiments of a method of treating macular degeneration.

[0022] FIG. 5 is a flowchart depicting some embodiments of a method of treating dry eye disease (DED).

[0023] FIG. 6 is a flowchart depicting some embodiments of a method of treating age-related vascular dysfunction.

[0024] FIG. 7 is a flowchart depicting some embodiments of a method of increasing tear formation.

[0025] FIG. 8 is a flowchart depicting some embodiments of a method of decreasing corneal sensitivity.

[0026] FIG. 9 is a flowchart depicting some embodiments of a method of treating cataracts.

[0027] FIG. 10 is a flowchart depicting some embodiments of a method of preventing or reducing cataract formation.

[0028] FIG. 11 is a flowchart depicting some embodiments of a method of treating diabetic retinopathy.

[0029] FIG. 12 is a flowchart depicting some embodiments of a method of treating retinal drusen.

[0030] FIG. 13 is a representation of some embodiments of an anti-Gal3 dosing procedure for treatment of dry eye disease (DED).

[0031] FIG. 14 shows images of some embodiments of palpebral opening in mice with normal eyes and mice with dry eye disease (DED).

[0032] FIG. 15 is a graph quantifying palpebral opening in some embodiments of mice with normal and mice with dry eye disease (DED).

[0033] FIG. 16 is a graph depicting the results of a Von Frey filament test on some embodiments of mice with normal eyes and mice with dry eye disease treated with or without anti-Gal3 antibody.

[0034] FIG. 17 is a graph depicting the results of a Von Frey filament test on some embodiments of mice with normal eyes and mice with dry eye disease treated with or without anti-Gal3 antibody.

[0035] FIG. 18 is an illustration depicting some embodiments of a Schirmer's test for measuring tear production.

[0036] FIG. 19 is a pair of graphs quantifying tear production in female (top) and male (bottom) mice with dry eye disease following treatment with or without anti-Gal3 antibody.

[0037] FIG. 20 is a pair of graphs depicting quantification of Gal-3 concentration in the tears of mice with normal eyes and mice with dry eye disease with or without anti-Gal3 antibody administration.

[0038] FIG. 21 is a pair of graphs depicting the body weight of female (top) and male (bottom) mice treated with or without anti-Gal3 antibodies.

[0039] FIG. 22 shows images of some embodiments of cataract staging in mice with normal eyes and mice with dry eye disease (DED).

[0040] FIG. 23 is a pair of graphs depicting cataract staging in some embodiments of mice treated with or without anti-Gal3 antibody.

[0041] FIG. 24 depicts protein sequences of Gal3 and exemplary proteins that exhibit pathogenic aggregation.

[0042] FIG. 25 depicts peptide sequences of Gal3 used to generate and analyze antibodies.

[0043] FIG. 26A depicts exemplary variable heavy chain complementarity-determining region (CDR) 1 for anti-Gal3 antibodies disclosed herein. In some embodiments, any of the compositions or methods provided herein can include one or more of the variable heavy chain CDR1 provided herein.

[0044] FIG. 26B depicts exemplary variable heavy chain CDR2 for anti-Gal3 antibodies disclosed herein. In some embodiments, any of the compositions or methods provided herein can include one or more of the variable heavy chain CDR2 provided herein.

[0045] FIG. 26C depicts exemplary variable heavy chain CDR3 for anti-Gal3 antibodies disclosed herein. In some embodiments, any of the compositions or methods provided herein can include one or more of the variable heavy chain CDR3 provided herein.

[0046] FIG. 27A depicts exemplary variable light chain CDR1 for anti-Gal3 antibodies disclosed herein. In some embodiments, any of the compositions or methods provided herein can include one or more of the variable light chain CDR1 provided herein.

[0047] FIG. 27B depicts exemplary variable light chain CDR2 for anti-Gal3 antibodies disclosed herein. In some embodiments, any of the compositions or methods provided herein can include one or more of the variable light chain CDR2 provided herein.

[0048] FIG. 27C depicts exemplary variable light chain CDR3 for anti-Gal3 antibodies disclosed herein. In some embodiments, any of the compositions or methods provided herein can include one or more of the variable light chain CDR3 provided herein.

[0049] FIG. 28 depicts exemplary heavy chain variable region (VH) sequences for anti-Gal3 antibodies disclosed herein. In some embodiments, any of the compositions or methods provided herein can include one or more of the VH sequences provided herein.

[0050] FIG. 29 depicts exemplary light chain variable region (VL) sequences for anti-Gal3 antibodies disclosed herein. In some embodiments, any of the compositions or methods provided herein can include one or more of the VL sequences provided herein.

[0051] FIG. 30 depicts exemplary combinations of heavy and light chain CDRs (CDR1, CDR2, and CDR3) of exemplary anti-Gal3 antibodies disclosed herein. In some embodiments, any of the compositions or methods provided herein can include one or more of the heavy and light chain CDR combinations provided herein.

[0052] FIG. 31 depicts exemplary combinations of heavy and light chain variable regions of exemplary anti-Gal3 antibodies disclosed herein. In some embodiments, any of the compositions or methods provided herein can include one or more of the heavy and light chain variable region combinations provided herein.

[0053] FIG. 32 depicts exemplary heavy chain (HC) sequences and light chain (LC) sequences, and possible pairings for exemplary anti-Gal3 antibodies disclosed herein. In some embodiments, any of the compositions or methods provided herein can include one or more of the HC or LC, or pairs of HC and LC sequences provided herein.

[0054] FIG. 33 depicts antibody names used throughout the present disclosure refer to the same antibody (with exemplary peptide and nucleic acid sequences provided elsewhere in the disclosure and appropriately attributed to at least one of the depicted names) and may be used interchangeably. The names shown in a column correspond to the same antibody.

[0055] FIG. 34 depicts an alignment of hinge and constant heavy chain domain 2 (CH2) domain amino acid sequences of wild-type human immunoglobulin G1 (IgG1), IgG2 and IgG4 as well as their sigma variants. The alignment above uses EU numbering. Residues identical to wild-type IgG1 are indicated as dots; gaps are indicated with hyphens. Sequence is given explicitly if it differs from wild-type IgG1 or from the parental subtype for σ variants. Open boxes beneath the alignment correspond to International Immunogenetics Information System (IMGT) strand definitions. Boxes beneath the alignment correspond to the strand and helix secondary structure assignment for wild-type IgG1. Residues 267-273 form the BC loop and 322-332 form the FG loop. Also provided are exemplary constant regions for human IgG4 heavy (S228P mutant) and light (kappa) chains (SEQ ID NOs: 931-932) and murine IgG2A (LALAPG and LALA mutants) (SEQ ID NOs: 933-934). In some embodiments, any one or more of the VH/VL and/or CDRs provided in the other figures or otherwise disclosed herein can be paired with any one or more of the exemplary constant regions provided herein.

[0056] FIG. 35 depicts nucleic acid sequences that encode for exemplary heavy chain variable regions of anti-Gal3 antibodies disclosed herein. In some embodiments, any of the compositions or methods provided herein can include one or more of the heavy chain variable regions encoded by the nucleic acids provided herein.

[0057] FIG. 36 depicts nucleic acid sequences that encode for exemplary light chain variable regions of anti-Gal3 antibodies disclosed herein. In some embodiments, any of the compositions or methods provided herein can include one or more of the light chain variable regions encoded by the nucleic acids provided herein.

[0058] FIG. 37 depicts nucleic acid sequences that encode for exemplary heavy chains of anti-Gal3 antibodies disclosed herein. In some embodiments, any of the compositions or methods provided herein can include one or more of the heavy chains encoded by the nucleic acids provided herein.

[0059] FIG. 38 depicts nucleic acid sequences that encode for exemplary light chains of anti-Gal3 antibodies disclosed herein. In some embodiments, any of the compositions or methods provided herein can include one or more of the light chains encoded by the nucleic acids provided herein.

[0060] FIG. 39A depicts an exemplary alignment for the heavy chain CDRs (FIG. 39A) for some exemplary anti-Gal3 antibodies disclosed herein.

[0061] FIG. 39B depicts an exemplary alignment for the light chain CDRs for some exemplary anti-Gal3 antibodies disclosed herein.

[0062] FIG. 40 is a series of representative images and blots depicting some embodiments of time course aggregation of crystallin AA and crystalin AB incubated with or without Gal3.

[0063] FIG. 41 is a flowchart depicting some embodiments of a method of treating glaucoma.

### DETAILED DESCRIPTION

[0064] Ocular surface diseases including but not limited to dry eye disease (DED), age-related macular degeneration (AMD), glaucoma, and cataracts, result in symptoms of ocular discomfort, visual disturbance, and tear dysfunction, and potentially result in damage to the ocular surface. Common symptoms of ocular surface diseases include dryness of eye, foreign body sensation, burning sensation, itching, photophobia, eye redness, cloudy eyes, drusen, blurred vision, fluctuating vision, visual fatigue, loss of vision, blurry or fuzzy vision, difficulty recognizing familiar faces, straight lines appear wavy, a dark, empty area or blind spot appears in the center of vision, or loss of central vision, which is necessary for driving, reading, recognizing faces, and performing close-up work, among others. Although the pathogeneses of the various ocular pathologies are usually complex and still under intense and continuous investigation, many feature one or a combination of vascular dysfunction, angiogenesis, inflammation, and oxidative stress.

[0065] Galectin-3 levels found in tears has been associated with epithelial dysfunction in patients with DED and its concentration has significant relationship with the severity of ocular surface barrier disruption. Therefore Galectin-3 is a novel target whose antagonist antibodies can be useful therapeutic drugs for DED. Accordingly, some aspects of the present disclosure are directed to methods of treating DED and other eye diseases or conditions using anti-Gal3 antibodies or fragments thereof. In some embodiments, any of the antibodies or constructs comprising any of the antibody components having the sequences defined in any of the figures provided herein can be used in any of the methods provided herein.

### Definitions

[0066] In the following detailed description, reference is made to the accompanying drawings, which form a part hereof. In the drawings, similar symbols typically identify similar components, unless context dictates otherwise. The illustrative embodiments described in the detailed description, drawings, and claims are not meant to be limiting. Other embodiments may be utilized, and other changes may be made, without departing from the spirit or scope of the subject matter presented herein. It will be readily understood that the aspects of the present disclosure, as generally described herein, and illustrated in the Figures, can be arranged, substituted, combined, separated, and designed in a wide variety of different configurations, all of which are explicitly contemplated herein.

[0067] Unless defined otherwise, all technical and scientific terms used herein have the same meaning as is commonly understood by one of skill in the art to which the claimed subject matter belongs. It is to be understood that the foregoing general description and the following detailed description are exemplary and explanatory only and are not restrictive of any subject matter claimed.

[0068] The section headings used herein are for organizational purposes only and are not to be construed as limiting the subject matter described.

[0069] The articles “a” and “an” are used herein to refer to one or to more than one (for example, at least one) of the grammatical object of the article. By way of example, “an element” means one element or more than one element.

[0070] By “about” is meant a quantity, level, value, number, frequency, percentage, dimension, size, amount, weight or length that varies by as much as 30, 25, 20, 15, 10, 9, 8, 7, 6, 5, 4, 3, 2 or 1% to a reference quantity, level, value, number, frequency, percentage, dimension, size, amount, weight or length.

[0071] Throughout this specification, unless the context requires otherwise, the words “comprise,” “comprises,” and “comprising” will be understood to imply the inclusion of a stated step or element or group of steps or elements but not the exclusion of any other step or element or group of steps or elements. By “consisting of” is meant including, and limited to, whatever follows the phrase “consisting of.” Thus, the phrase “consisting of” indicates that the listed elements are required or mandatory, and that no other elements may be present. By “consisting essentially of” is meant including any elements listed after the phrase and limited to other elements that do not interfere with or contribute to the activity or action specified in the disclosure for the listed elements. Thus, the phrase “consisting essentially of” indicates that the listed elements are required or mandatory, but that other elements are optional and may or may not be present depending upon whether or not they materially affect the activity or action of the listed elements.

[0072] As used herein, the terms “individual(s)”, “subject(s)” and “patient(s)” mean any mammal. In some embodiments, the mammal is a human. In some embodiments, the mammal is a non-human. None of the terms require or are limited to situations characterized by the supervision (e.g., constant, or intermittent) of a health care worker (e.g., a doctor, a registered nurse, a nurse practitioner, a physician's assistant, an orderly or a hospice worker).

[0073] As used herein, the term “microglia” refers to a specialized population of macrophage-like cells in the central nervous system (CNS). Microglia are considered immune sentinels that are the primary innate immune effector cells of the CNS. Microglia are also involved in synaptic organization, trophic neuronal support during development, phagocytosis of apoptotic cells in the developing brain, myelin turnover, control of neuronal excitability, phagocytic debris removal as well as brain protection and repair.

[0074] As used herein, the term “macrophage” refers to a type of white blood cell that surrounds and kills microorganisms, removes dead cells, and stimulates the action of other immune system cells.

[0075] As used herein, the term “central nervous system” (CNS) refers to part of the nervous system that consists of the brain and spinal cord.

[0076] As used herein, the term “cataract” refers to a clouding of the normally clear lens of the eye. Cataracts may cause changes in a subject's vision. These changes may include cloudy or blurry vision, colors appearing faded, poor night vision, sensitivity to lamps, sunlight, headlights, or other light, the appearance of a halo around lights, double vision, or the need to alter eye glass or contact lens prescription often. Cataracts severity may be assessed by observing the opacity of the eye. Stage 0 cataracts refer to a normal transplant lens. Stage 1 cataracts show initial signs of nuclear opacity and little light scattering is observed with a white-light lamp. Stage 2 cataracts demonstrate little light scattering with the naked eye, and slight nuclear opacity, including swollen fibers or posterior sub-capsular scattering with a white-light lamp. Stage 3 cataracts diffuse nuclear opacity with the naked eye. Stage 4 cataracts demonstrate partial nuclear opacity with the naked eye. Stage 5 cataracts demonstrate dense opacity that does not involve the lens cortex. Stage 6 cataracts demonstrate mature dense opacity.

[0077] As used herein, the term “retinal drusen” or “drusen” refers to yellow deposits under the retina. Drusen are comprised of lipids and proteins. The presence of drusen is a biomarker for age-related macular degeneration (AMD). Drusen comprised of protein and calcium salts can also occur in the optic nerve and generally appear in both eyes. Unlike the drusen associated with AMD, optic nerve drusen or optic disc drusen are not related to aging, may be inherited, and typically appear in children. Optic nerve drusen usually do not affect vision, but some patients with these drusen may lose peripheral (side) vision.

[0078] As used herein, the term “age-related macular degeneration” (AMD) refers to a disease affecting a subject's central vision and with it, the ability to see fine details. In AMD, a part of the retina called the macula is damaged. In advanced stages, people lose their ability to drive, to see faces, and to read smaller print. In its early stages, AMD may have no signs or symptoms, so people may not suspect they have it. The two primary forms of AMD have different causes. Dry AMD is the most common form of AMD. About 80% of those with AMD have the dry form. This happens as the light-sensitive cells in the macula slowly break down, generally one eye at a time. The loss of vision in Dry AMD is usually slow and gradual. It is believed that the age-related damage of an important support membrane under the retina contributes to dry age-related macular degeneration. Wet AMD is less common; however, it usually leads to more severe vision loss in patients than dry AMD. It is the most common cause of severe loss of vision. Wet AMD happens when abnormal blood vessels start to grow beneath the retina. They leak fluid and blood and can create a large blind spot in the center of the visual field. AMD can result in severe loss of central vision but does not generally result in blindness. Risk factors for AMD include being 50 and older, smoking, having high blood pressure and eating a diet high in saturated fat. Symptoms of AMD may include blurry or fuzzy vision, difficulty recognizing familiar faces, straight lines appear wavy, a dark, empty area or blind spot appears in the center of vision, or loss of central vision, which is necessary for driving, reading, recognizing faces, and performing close-up work. The presence of drusen, which are tiny yellow deposits in the retina, is one of the most common early signs of age-related macular degeneration. It may mean the eye is at risk for developing more severe age-related macular degeneration. Diagnosis of age-related macular degeneration may comprise administration of a visual acuity test, pupil dilation, fluorescein angiography, or an Amsler Grid.

[0079] As used herein, the term “glaucoma” refers to a group of eye conditions that damage the optic nerve. The optic nerve sends visual information from the eye to the brain and is vital for good vision. Damage to the optic nerve is often related to high intra ocular pressure (IOP) although a subject may have glaucoma without increased IOP. Symptoms of glaucoma depend on the type and stage of the glaucoma. Open-angle glaucoma is the most common form of glaucoma. The drainage angle formed by the iris and cornea remains open. But other parts of the drainage system don't drain properly. This may lead to a slow, gradual increase in eye pressure. The symptoms of open-angle glaucoma include no symptoms in early stages, gradual development of patchy blind spots in side vision or peripheral vision, and, in later stages, difficulty seeing things in the central vision. Angle-closure glaucoma occurs when the iris bulges. The bulging iris partially or completely blocks the drainage angle. As a result, fluid can't circulate through the eye and pressure increases. Angle-closure glaucoma may occur suddenly or gradually. Symptoms of acute angle-closure glaucoma include severe headache, severe eye pain, nausea or vomiting, blurred vision, halos or colored rings around lights, and eye redness. Normal-tension glaucoma occurs when the optic nerve becomes damaged when eye pressure is normal. The optic nerve may be sensitive or experience less blood flow. This limited blood flow may be caused by the buildup of fatty deposits in the arteries or other conditions that damage circulation. The buildup of fatty deposits in the arteries also is known as atherosclerosis. Symptoms of normal-tension glaucoma include no symptoms in early stages, gradual development of blurred vision, and in later stages, loss of side or peripheral vision. Glaucoma in children may be present from birth or developed over the first few years of life. Blocked drainage, injury or an underlying medical condition may cause optic nerve damage. Symptoms of glaucoma in children include a dull or cloudy eye (infants), increased blinking (infants), tears without crying (infants), blurred vision, nearsightedness that gets worse, and headache. Pigmentary glaucoma occurs when small pigment granules flake off from the iris and block or slow fluid drainage from the eye. Activities such as jogging sometimes stir up the pigment granules. That leads to a deposit of pigment granules on tissue located at the angle where the iris and cornea meet. The granule deposits cause an increase in pressure. Symptoms of pigmentary glaucoma include halos around lights, blurred vision with exercise, and gradual loss of side vision. Risk factors for glaucoma include increased intraocular pressure, age over 55, black, ethnic and genetic factors, family history, certain medical conditions including diabetes, migraines, high blood pressure and sickle cell anemia, corneas that are thin in the center, extreme nearsightedness or farsightedness, eye injury or certain types of eye surgery, taking corticosteroid medicines, and especially eye drops, for a long time.

[0080] As used herein, the term “visual acuity test refers to a common eye chart test measures vision ability at various distances.

[0081] As used herein, the term “pupil dilation” refers to the widening of a subject's pupils to allow a close-up examination of the eye's retina.

[0082] As used herein, the term “palpebral opening” or “palpebral fissure” refers to the opening for the eyes between the eyelids.

[0083] As used herein, the term “fluorescein angiography” refers to an eye test that uses a dye and camera to look at blood flow in the retina and choroid. The dye is injected into a vein in the arm. Pictures are then taken as the dye passes through the blood vessels in the retina, helping a doctor evaluate if the blood vessels are leaking and whether or not the leaking can be treated. Fluorescein angiography may be used to detect wet age-related macular degeneration.

[0084] As used herein, the term “Amsler grid” refers to a simple square containing a grid pattern and a dot in the middle. This design, when used correctly, can show problem spots in a subject's field of vision. The Amsler grid may be used to detect wet age-related macular degeneration. If the straight lines in the checkerboard like grid appear wavy or missing to the patient the subject may have or be at risk of having AMD.

[0085] As used herein, the term “diabetic retinopathy” refers to a diabetes complication affecting a subject's eyes. Diabetic retinopathy is caused by damage to the blood vessels of the light-sensitive tissue at the back of the eye (retina) in subjects with type 1 or type 2 diabetes. As a result, the eye attempts to grow new blood vessels. There are two types of diabetic retinopathy: “early diabetic retinopathy” or “non-proliferative diabetic retinopathy” (NPDR) and “advanced diabetic retinopathy.” Subject's having NPDR experience a weakening of the walls of the blood vessels in their retina. Tiny bulges protrude from the walls of the smaller vessels, sometimes leaking fluid and blood into the retina. Larger retinal vessels can begin to dilate and become irregular in diameter as well. NPDR can progress from mild to severe as more blood vessels become blocked. Sometimes retinal blood vessel damage leads to a buildup of fluid (edema) in the center portion (macula) of the retina. If macular edema decreases vision, treatment is required to prevent permanent vision loss. Diabetic retinopathy left untreated can progress to “advanced diabetic retinopathy” or “proliferative diabetic retinopathy.” In “advanced diabetic retinopathy” or “proliferative diabetic retinopathy,” damaged blood vessels close off, causing the growth of new, abnormal blood vessels in the retina. These new blood vessels are fragile and can leak into the clear, jellylike substance (vitreous) that fills the center of the subject's eye. Scar tissue from the growth of new blood vessels may eventually cause the retina to detach from the back of the subject's eye. If the new blood vessels interfere with the normal flow of fluid out of the eye, pressure can build in the eyeball. This buildup can damage the nerve that carries images from the subject's eye to their brain (optic nerve), resulting in glaucoma. Early symptoms of diabetic retinopathy may be non-existent or include or only mild vision problems. Left untreated, diabetic retinopathy may eventually lead to spots or dark strings floating in a subject's vision (“floaters”), blurred vision, fluctuating vision, dark or empty areas in a subject's vision, vision loss, or blindness. The risk of developing diabetic retinopathy can increase as a result of having diabetes for a long time, poor control of blood sugar level, high blood pressure, high cholesterol, pregnancy, tobacco use, ethnic predisposition, or genetic predisposition.

[0086] As used herein, the term “ocular surface disease” refers to a multifactorial disease of the ocular surface that results in symptomatic discomfort, visual disturbances, and tear film instability with progressive histopathologic and clinical changes to the ocular surface. Ocular surface disease is characterized by an increased osmolarity of the tear film and upregulation of inflammatory mediators. Ocular surface diseases affect and damage the surface layers of the eyes including the cornea, the conjunctiva, and the glandular network. Ocular surface diseases include dry eye disease (DED), blepharitis, neurotrophic keratitis, ocular rosacea, meibomian gland dysfunction, decreased tear quality and/or production with age, chemical or thermal burns, side effects of medical treatments or prescription medications, conjunctivitis, Sjogren's disease, allergies, and other immunological conditions.

[0087] As used herein, the term “dry eye disease” (DED) is a condition in which the eyes either don't form enough tears or don't form functional tears. Tears can be inadequate and unstable for many reasons. For example, dry eyes may occur if a subject does not produce enough tears or produces poor-quality tears. This tear instability leads to inflammation and damage of the eye's surface. This can lead to eye infections and damage to the surface of the eyes, which can harm a subject's quality of life. Symptoms of DED may include: a stinging or burning feeling in the eyes, eye redness, watery eyes, blurred vision, stringy mucus in or around the eyes, difficulty wearing contact lenses, or difficulty driving. Risk factors for DED include being older than 50, being a woman, eating a diet that is low in vitamin A, and wearing contact lenses or having a history of refractive surgery.

[0088] As used herein, the term “blepharitis” refers to the inflammation of the eyelids. Blepharitis usually occurs as a result of clogged oil ducts near the base of the eyelashes. Although blepharitis itself usually doesn't cause any issues with vision, it's uncomfortable and it can lead to issues like eyelash or eyelid skin problems, dry eyes, styes, chronic pinkeye, corneal injury, or a chalazion. Symptoms of blepharitis include watery or red eyes, crusted or sticky eyes, itchy, red, or swollen eyelids, frequent blinking, sensitivity to light, and blurred vision.

[0089] As used herein, the term “chalazion” refers to a blockage that can cause swelling and a hard lump in the eyelid.

[0090] As used herein, the term “stye” refers to a red, painful lump near the edge of the eyelid that may look like a boil or a pimple. Styes are often filled with pus. A stye usually forms on the outside of the eyelid, but sometimes it can form on the inner part of the eyelid. Signs and symptoms of a stye include: a red lump on the eyelid that is similar to a boil or a pimple, eyelid pain, eyelid swelling, or tearing.

[0091] As used herein, the term “neurotrophic keratitis” refers to a degenerative condition caused by nerve impairment. This impairment leads to reduced sensitivity of the cornea. As a result, a subject's eyes don't instinctively close when they need to, which can result in dry eyes or damage to the cornea. Symptoms of neurotrophic keratitis may include red or dry eyes, blurred vision, or sensitivity to light.

[0092] As used herein, the term “ocular rosacea” refers to inflammation that causes redness, burning and itching of the eyes. ocular rosacea often develops in people who have rosacea, a chronic skin condition that affects the face. Sometimes ocular (eye) rosacea is the first sign that a subject may later develop the facial type. Ocular rosacea primarily affects adults between the ages of 30 and 50. There's no cure for ocular rosacea, but medications and a good eye care routine can help control the signs and symptoms. Signs and symptoms of ocular rosacea can precede the skin symptoms of rosacea, develop at the same time, develop later, or occur on their own. Signs and symptoms of ocular rosacea may include: red, burning, itchy or watering eyes, dry eyes, grittiness or the feeling of having a foreign body in the eye or eyes, blurred vision, sensitivity to light (photophobia), dilated small blood vessels on the white part of the eye, red and swollen eyelids, recurrent eye or eyelid infections, such as pink eye (conjunctivitis), blepharitis, sties, or chalazion. The severity of ocular rosacea symptoms doesn't always match the severity of skin symptoms. Risk factors for developing ocular include heredity and environmental factors, bacterial involvement, blocked glands in the eyelids, or eyelash mites. A subject may risk aggravating ocular rosacea by ingesting or consuming hot or spicy foods or beverages, consuming or ingesting alcohol, exposure to sunlight, exposure to wind, exposure to temperature extremes, experience certain emotions, such as stress, anger, or embarrassment, engage in strenuous exercise, or take hot baths or saunas.

[0093] As used herein, the term “meibomian gland” refers to oil glands which line the margin of the eyelids (the edges which touch when the eyelids are closed). Meibomian glands secrete oil which coats the surface of the eyes and keeps the water component of tears from evaporating (drying out). Together, the water and the oil layer make up the tear film. The tear film lubricates and keeps the surface of the eyes healthy; it also affects how a subject sees. If either the water or oil layer is decreased, or is of poor quality, a subject may have symptoms of irritation and/or blurred vision.

[0094] As used herein, the term “meibomian gland dysfunction” refers to the condition where the meibomian glands are not secreting enough oil or when the oil they secrete is of poor quality. Often, the oil gland openings get plugged up so that less oil comes out of the glands. The oil that does make it out of the glands can be granular (crusty) or otherwise unhealthy and can cause irritation. Meibomian gland dysfunction is very common. In the early stages, subjects are often asymptomatic, but if left untreated, meibomian gland dysfunction can cause or exacerbate dry eye symptoms and eyelid inflammation. The oil glands become blocked with thickened secretions. Chronically clogged glands eventually become unable to secrete oil which results in permanent changes in the tear film and dry eyes. Symptoms of meibomian gland dysfunction include dryness, burning, itching, stickiness/crustiness, watering, light sensitivity, red eyes, foreign body sensation, chalazion/styes, or intermittent blurry vision.

[0095] As used herein, the term “cornea” refers to the clear, dome-shaped lens that covers the front of the eye. The cornea focuses the light coming into the eye.

[0096] As used herein, the term “corneal sensitivity” refers to the capability of the cornea to respond to stimulation. Sensitivity varies across the cornea, with the center being the most sensitive. Diseases and rigid contact lens wear greatly reduce the sensitivity of the cornea. Other corneal sensitivity threshold includes thermal thresholds and chemical thresholds. Corneal sensitivity may be assessed quantitatively or qualitatively. Corneal sensitivity to touch is assessed by an aesthesiometer that measures the corneal touch threshold (CTT) or mechanical threshold, which is the reciprocal of corneal sensitivity. The handheld esthesiometer (Cochet-Bonnet) is a device that contains a thin, retractable, nylon monofilament that extends up to 6 cm in length. Variable pressure can be applied by the device by adjusting the length. The monofilament ranges from 60 mm to 5 mm and as the length is decreased the pressure increases from 11 mm/gm to 200 mm/gm. Qualitative assessment typically involves use of cotton-tipped applicator or small piece of dental floss. In qualitative assessments, a wisp of the cotton-tipped applicator or floss is used to compare sensation in each eye. All four quadrants of the eye are tested and the sensation in each location is recorded as normal, reduced, or absent. A von Frey test may also be used. The von Frey test involves applying a punctate stimulus to a given region of the rodent's body and recording the stimulus intensity that evokes a withdrawal reflex. Stimuli are typically applied using calibrated fibers with a specific bending force.

[0097] As used herein, the term “conjunctiva” refers to a clear membrane that lines the inside of the eyelids and covers the whites of the eyes. The conjunctiva produces a layer of mucus that covers the eyes and becomes a part of the tears. It also creates a barrier that helps keep microorganisms and foreign objects out.

[0098] The terms “polypeptide”, “peptide”, and “protein” are used interchangeably herein to refer to polymers of amino acids of any length. The polymer may be linear, cyclic, or branched, it may comprise modified amino acids, and it may be interrupted by non-amino acids. The terms also encompass amino acid polymers that have been modified, for example, via sulfation, glycosylation, lipidation, acetylation, phosphorylation, iodination, methylation, oxidation, proteolytic processing, phosphorylation, prenylation, racemization, selenoylation, transfer-RNA mediated addition of amino acids to proteins such as arginylation, ubiquitination, or any other manipulation, such as conjugation with a labeling component.

[0099] As used herein the term “amino acid” refers to either natural and/or unnatural or synthetic amino acids, including glycine and both the D or L optical isomers, and amino acid analogs and peptidomimetics.

[0100] A polypeptide or amino acid sequence “derived from” a designated protein refers to the origin of the polypeptide. Preferably, the polypeptide has an amino acid sequence that is essentially identical to that of a polypeptide encoded in the sequence, or a portion thereof wherein the portion consists of at least 10-20 amino acids, or at least 20-30 amino acids, or at least 30-50 amino acids, or which is immunologically identifiable with a polypeptide encoded in the sequence. This terminology also includes a polypeptide expressed from a designated nucleic acid sequence. Peptide sequences having at least 80%, 85%, 90%, 95%, 99%, or 100% homology to any one of the peptide sequences disclosed herein and having the same or similar functional properties are envisioned. The percent homology may be determined according to amino acid substitutions, deletions, or additions between two peptide sequences. Peptide sequences having some percent homology to any one of the peptide sequences disclosed herein may be produced and tested by one skilled in the art through conventional methods. The % homology or % identity of two sequences is well understood in the art and can be calculated by the number of conserved amino acids or nucleotides relative to the length of the sequences.

[0101] As used herein, the term “antibody” denotes the meaning ascribed to it by one of skill in the art, and further it is intended to include any polypeptide chain-containing molecular structure with a specific shape that fits to and recognizes an epitope, where one or more non-covalent binding interactions stabilize the complex between the molecular structure and the epitope. Antibodies utilized in the present invention may be polyclonal antibodies, although monoclonal antibodies are preferred because they may be reproduced by cell culture or recombinantly and can be modified to reduce their antigenicity.

[0102] In addition to entire immunoglobulins (or their recombinant counterparts), immunoglobulin fragments or “binding fragments” comprising the epitope binding site (e.g., Fab′, F(ab′)2, single-chain variable fragment (scFv), diabody, minibody, nanobody, single-domain antibody (sdAb), or other fragments) are useful as antibody moieties in the present invention. Such antibody fragments may be generated from whole immunoglobulins by ricin, pepsin, papain, or other protease cleavage. Minimal immunoglobulins may be designed utilizing recombinant immunoglobulin techniques. For instance, “Fv” immunoglobulins for use in the present invention may be produced by linking a variable light chain region to a variable heavy chain region via a peptide linker (e.g., poly-glycine or another sequence which does not form an alpha helix or beta sheet motif). Nanobodies or single-domain antibodies can also be derived from alternative organisms, such as dromedaries, camels, llamas, alpacas, or sharks. In some embodiments, antibodies can be conjugates, e.g., pegylated antibodies, drug, radioisotope, or toxin conjugates. Monoclonal antibodies directed against a specific epitope, or combination of epitopes, will allow for the targeting and/or depletion of cellular populations expressing the marker. Various techniques can be utilized using monoclonal antibodies to screen for cellular populations expressing the marker(s) and include magnetic separation using antibody-coated magnetic beads, “panning” with antibody attached to a solid matrix (i.e., plate), and flow cytometry (e.g., U.S. Pat. No. 5,985,660, hereby expressly incorporated by reference in its entirety).

[0103] As known in the art, the term “Fc region” is used to define a C-terminal region of an immunoglobulin heavy chain. The “Fc region” may be a native sequence Fc region or a variant Fc region. Although the boundaries of the Fc region of an immunoglobulin heavy chain might vary, the human IgG heavy chain Fc region is usually defined to stretch from an amino acid residue at position Cys226, or from Pro230, to the carboxyl-terminus thereof. The numbering of the residues in the Fc region is that of the EU index as in Kabat. Kabat et al., Sequences of Proteins of Immunological Interest, 5th Ed. Public Health Service, National Institutes of Health, Bethesda, Md., 1991. The Fc region of an immunoglobulin generally comprises two constant domains, CH2 and CH3. As is known in the art, an Fc region can be present in dimer or monomeric form.

[0104] As known in the art, a “constant region” of an antibody refers to the constant region of the antibody light chain or the constant region of the antibody heavy chain, either alone or in combination.

[0105] A “variable region” of an antibody refers to the variable region of the antibody light chain or the variable region of the antibody heavy chain, either alone or in combination. As known in the art, the variable regions of the heavy and light chains each consist of four framework regions (FRs) connected by three complementarity determining regions (CDRs) also known as hypervariable regions and contribute to the formation of the antigen binding site of antibodies. If variants of a subject variable region are desired, particularly with substitution in amino acid residues outside of a CDR region (i.e., in the framework region), appropriate amino acid substitution, preferably, conservative amino acid substitution, can be identified by comparing the subject variable region to the variable regions of other antibodies which contain CDR1 and CDR2 sequences in the same canonical class as the subject variable region (Chothia and Lesk, J Mol Biol 196 (4): 901-917, 1987).

[0106] In certain embodiments, definitive delineation of a CDR and identification of residues comprising the binding site of an antibody is accomplished by solving the structure of the antibody and/or solving the structure of the antibody-ligand complex. In certain embodiments, which can be accomplished by any of a variety of techniques known to those skilled in the art, such as X-ray crystallography. In certain embodiments, various methods of analysis can be employed to identify or approximate the CDR regions. In certain embodiments, various methods of analysis can be employed to identify or approximate the CDR regions. Examples of such methods include, but are not limited to, the Kabat definition, the Chothia definition, the IMGT approach (Lefranc et al., 2003) Dev Comp Immunol. 27:55-77), computational programs such as Paratome (Kunik et al., 2012, Nucl Acids Res. W521-4), the AbM definition, and the conformational definition.

[0107] The Kabat definition is a standard for numbering the residues in an antibody and is typically used to identify CDR regions. See, e.g., Johnson & Wu, 2000, Nucleic Acids Res., 28:214-8. The Chothia definition is similar to the Kabat definition, but the Chothia definition takes into account positions of certain structural loop regions. See, e.g., Chothia et al., 1986, J. Mol. Biol., 196:901-17; Chothia et al., 1989, Nature, 342:877-83. The AbM definition uses an integrated suite of computer programs produced by Oxford Molecular Group that model antibody structure. Sec, e.g., Martin et al., 1989, Proc Natl Acad Sci (USA), 86:9268-9272; “AbM™, A Computer Program for Modeling Variable Regions of Antibodies,” Oxford, UK; Oxford Molecular, Ltd. The AbM definition models the tertiary structure of an antibody from primary sequence using a combination of knowledge databases and ab initio methods, such as those described by Samudrala et al., 1999, “Ab Initio Protein Structure Prediction Using a Combined Hierarchical Approach,” in PROTEINS, Structure, Function and Genetics Suppl., 3:194-198. The contact definition is based on an analysis of the available complex crystal structures. See, e.g., MacCallum et al., 1996, J. Mol. Biol., 5:732-45. In another approach, referred to herein as the “conformational definition” of CDRs, the positions of the CDRs may be identified as the residues that make enthalpic contributions to antigen binding. Sec, e.g., Makabe et al., 2008, Journal of Biological Chemistry, 283:1156-1166. Still other CDR boundary definitions may not strictly follow one of the above approaches but will nonetheless overlap with at least a portion of the Kabat CDRs, although they may be shortened or lengthened in light of prediction or experimental findings that particular residues or groups of residues do not significantly impact antigen binding. As used herein, a CDR may refer to CDRs defined by any approach known in the art, including combinations of approaches. The methods used herein may utilize CDRs defined according to any of these approaches. For any given embodiment containing more than one CDR, the CDRs may be defined in accordance with any of Kabat, Chothia, extended, IMGT, Paratome, AbM, and/or conformational definitions, or a combination of any of the foregoing.

[0108] The term “compete,” as used herein with regard to an antibody, means that a first antibody, or an antigen-binding portion thereof, binds to an epitope in a manner sufficiently similar to the binding of a second antibody, or an antigen-binding portion thereof, such that the result of binding of the first antibody with its cognate epitope is detectably decreased in the presence of the second antibody compared to the binding of the first antibody in the absence of the second antibody. The alternative, where the binding of the second antibody to its epitope is also detectably decreased in the presence of the first antibody, can, but need not be the case. That is, a first antibody can inhibit the binding of a second antibody to its epitope without that second antibody inhibiting the binding of the first antibody to its respective epitope. However, where each antibody detectably inhibits the binding of the other antibody with its cognate epitope or ligand, whether to the same, greater, or lesser extent, the antibodies are said to “cross-compete” with each other for binding of their respective epitope(s). Both competing and cross-competing antibodies are encompassed by the present invention. Regardless of the mechanism by which such competition or cross-competition occurs (e.g., steric hindrance, conformational change, or binding to a common epitope, or portion thereof), the skilled artisan would appreciate, based upon the teachings provided herein, that such competing and/or cross-competing antibodies are encompassed and can be useful for the methods disclosed herein.

[0109] An antibody that “preferentially binds” or “specifically binds” (used interchangeably herein) to an epitope is a term well understood in the art, and methods to determine such specific or preferential binding are also well known in the art. A molecule is said to exhibit “specific binding” or “preferential binding” if it reacts or associates more frequently, and/or more rapidly, and/or with greater duration and/or with greater affinity with a particular cell or substance than it does with alternative cells or substances. An antibody “specifically binds” or “preferentially binds” to a target if it binds with greater affinity, and/or avidity, and/or more readily, and/or with greater duration than it binds to other substances. For example, an antibody that specifically or preferentially binds to a CFD epitope is an antibody that binds this epitope with greater affinity, and/or avidity, and/or more readily, and/or with greater duration than it binds to other CFD epitopes or non-CFD epitopes. It is also understood by reading this definition that, for example, an antibody (or moiety or epitope) that specifically or preferentially binds to a first target may or may not specifically or preferentially bind to a second target. As such, “specific binding” or “preferential binding” does not necessarily require (although it can include) exclusive binding. Generally, but not necessarily, reference to binding means preferential binding.

[0110] As used herein, the term “antigen binding molecule” refers to a molecule that comprises an antigen binding portion that binds to an antigen and, optionally, a scaffold or framework portion that allows the antigen binding portion to adopt a conformation that promotes binding of the antigen binding portion or provides some additional properties to the antigen binding molecule. In some embodiments, the antigen is Gal3. In some embodiments, the antigen binding portion comprises at least one CDR from an antibody that binds to the antigen. In some embodiments, the antigen binding portion comprises all three CDRs from a heavy chain of an antibody that binds to the antigen or from a light chain of an antibody that binds to the antigen. In some embodiments, the antigen binding portion comprises all six CDRs from an antibody that binds to the antigen (three from the heavy chain and three from the light chain). In some embodiments, the antigen binding portion is an antibody fragment.

[0111] Non-limiting examples of antigen binding molecules include antibodies, antibody fragments (e.g., an antigen binding fragment of an antibody), antibody derivatives, and antibody analogs. Further specific examples include, but are not limited to, a single-chain variable fragment (scFv), a nanobody (e.g. VH domain of camelid heavy chain antibodies; VHH fragment, see Cortez-Retamozo et al., Cancer Research, Vol. 64:2853-57, 2004), a Fab fragment, a Fab′ fragment, a F(ab′)2 fragment, a Fv fragment, a Fd fragment, and a complementarity determining region (CDR) fragment. These molecules can be derived from any mammalian source, such as human, mouse, rat, rabbit, pig, dog, cat, horse, donkey, guinea pig, goat, or camelid. Antibody fragments may compete for binding of a target antigen with an intact antibody and the fragments may be produced by the modification of intact antibodies (e.g., enzymatic, or chemical cleavage) or synthesized de novo using recombinant DNA technologies or peptide synthesis. The antigen binding molecule can comprise, for example, an alternative protein scaffold or artificial scaffold with grafted CDRs or CDR derivatives. Such scaffolds include, but are not limited to, antibody-derived scaffolds comprising mutations introduced to, for example, stabilize the three-dimensional structure of the antigen binding molecule as well as wholly synthetic scaffolds comprising, for example, a biocompatible polymer. See, for example, Korndorfer et al., 2003, Proteins: Structure, Function, and Bioinformatics, Volume 53, Issue 1:121-129 (2003); Roque et al., Biotechnol. Prog. 20:639-654 (2004). In addition, peptide antibody mimetics (“PAMs”) can be used, as well as scaffolds based on antibody mimetics utilizing fibronectin components as a scaffold.

[0112] An antigen binding molecule can also include a protein comprising one or more antibody fragments incorporated into a single polypeptide chain or into multiple polypeptide chains. For instance, antigen binding molecule can include, but are not limited to, a diabody (see, e.g., EP 404,097; WO 93/11161; and Hollinger et al., Proc. Natl. Acad. Sci. USA, Vol. 90:6444-6448, 1993); an intrabody; a domain antibody (single VL or VH domain or two or more VH domains joined by a peptide linker; see Ward et al., Nature, Vol. 341:544-546, 1989); a maxibody (2 scFvs fused to Fc region, see Fredericks et al., Protein Engineering, Design & Selection, Vol. 17:95-106, 2004 and Powers et al., Journal of Immunological Methods, Vol. 251:123-135, 2001); a triabody; a tetrabody; a minibody (scFv fused to CH3 domain; see Olafsen et al., Protein Eng Des Sel., Vol. 17:315-23, 2004); a peptibody (one or more peptides attached to an Fc region, see WO 00/24782); a linear antibody (a pair of tandem Fd segments (VH—CH1-VH—CH1) which, together with complementary light chain polypeptides, form a pair of antigen binding regions, see Zapata et al., Protein Eng., Vol. 8:1057-1062, 1995); a small modular immunopharmaceutical (see U.S. Patent Publication No. 20030133939); and immunoglobulin fusion proteins (e.g. IgG-scFv, IgG-Fab, 2scFv-IgG, 4scFv-IgG, VH-IgG, IgG-VH, and Fab-scFv-Fc).

[0113] In certain embodiments, an antigen binding molecule can have, for example, the structure of an immunoglobulin. An “immunoglobulin” is a tetrameric molecule, with each tetramer comprising two identical pairs of polypeptide chains, each pair having one “light” (about 25 kDa) and one “heavy” chain (about 50-70 kDa). The amino-terminal portion of each chain includes a variable region of about 100 to 110 or more amino acids primarily responsible for antigen recognition. The carboxy-terminal portion of each chain defines a constant region primarily responsible for effector function.

[0114] Unless otherwise specified, the complementarity defining regions disclosed herein follow the IMGT definition. In some embodiments, the CDRs can instead by Kabat, Chothia, or other definitions accepted by those of skill in the art.

[0115] As used herein, the terms “treating” or “treatment” (and as well understood in the art) means an approach for obtaining beneficial or desired results in a subject's condition, including clinical results. Beneficial or desired clinical results can include, but are not limited to, alleviation or amelioration of one or more symptoms or conditions, diminishment of the extent of a disease, stabilizing (i.e., not worsening) the state of disease, prevention of a disease's transmission or spread, delaying or slowing of disease progression, amelioration or palliation of the disease state, diminishment of the recurrence of disease, and remission, whether partial or total and whether detectable or undetectable. “Treating” and “treatment” as used herein also include prophylactic treatment. Treatment methods comprise administering to a subject a therapeutically effective amount of an active agent. The administering step may consist of a single administration or may comprise a series of administrations. The compositions are administered to the subject in an amount and for a duration sufficient to treat the subject. The length of the treatment period depends on a variety of factors, such as the severity of the condition, the age and genetic profile of the subject, the concentration of active agent, the activity of the compositions used in the treatment, or a combination thereof. It will also be appreciated that the effective dosage of an agent used for the treatment or prophylaxis may increase or decrease over the course of a particular treatment or prophylaxis regime. Changes in dosage may result and become apparent by standard diagnostic assays known in the art. In some embodiments, chronic administration may be required.

[0116] The terms “effective amount” or “effective dose” as used herein have their plain and ordinary meaning as understood in light of the specification and refer to that amount of a recited composition or compound that results in an observable designated effect. Actual dosage levels of active ingredients in an active composition of the presently disclosed subject matter can be varied so as to administer an amount of the active composition or compound that is effective to achieve the designated response for a particular subject and/or application. The selected dosage level can vary based upon a variety of factors including, but not limited to, the activity of the composition, formulation, route of administration, combination with other drugs or treatments, severity of the condition being treated, and the physical condition and prior medical history of the subject being treated. In some embodiments, a minimal dose is administered, and dose is escalated in the absence of dose-limiting toxicity to a minimally effective amount. Determination and adjustment of an effective dose, as well as evaluation of when and how to make such adjustments, are contemplated herein. In some non-limiting examples, an effective amount or effective dose of a composition or compound may relate to the amount or dose that provides a significant, measurable, or sufficient therapeutic effect towards the treatment of a neurological disease or proteopathy, such as Alzheimer's disease, or a symptom thereof. In some embodiments, the effective amount or effective dose of a composition or compound may treat, ameliorate, or prevent the progression of memory loss, dementia, disorientation, or any other symptom of Alzheimer's disease.

[0117] The term “administering” includes oral administration, topical contact, administration as a suppository, intravenous, intraperitoneal, intramuscular, intralesional, intrathecal, intranasal, or subcutaneous administration, or the implantation of a slow-release device, e.g., a mini-osmotic pump, to a subject. Administration is by any route, including parenteral and transmucosal (e.g., buccal, sublingual, palatal, gingival, nasal, vaginal, rectal, or transdermal). Parenteral administration includes, e.g., intravenous, intramuscular, intra-arteriole, intradermal, subcutaneous, intraperitoneal, intraventricular, and intracranial. Other modes of delivery include, but are not limited to, the use of liposomal formulations, intravenous infusion, transdermal patches, etc. By “co-administer” it is meant that a first compound described herein is administered at the same time, just prior to, or just after the administration of a second compound described herein.

[0118] As used herein, the term “therapeutic target” refers to a gene or gene product that, upon modulation of its activity (e.g., by modulation of expression, biological activity, and the like), can provide for modulation of the disease phenotype. As used throughout, “modulation” is meant to refer to an increase or a decrease in the indicated phenomenon (e.g., modulation of a biological activity refers to an increase in a biological activity or a decrease in a biological activity).

[0119] As used herein, the term “standard of care”, “best practice” and “standard therapy” refers to the treatment that is accepted by medical practitioners to be an appropriate, proper, effective, and/or widely used treatment for a certain disease. The standard of care of a certain disease depends on many different factors, including the biological effect of treatment, region or location within the body, patient status (e.g. age, weight, gender, hereditary risks, other disabilities, secondary conditions), toxicity, metabolism, bioaccumulation, therapeutic index, dosage, and other factors known in the art. Determining a standard of care for a disease is also dependent on establishing safety and efficacy in clinical trials as standardized by regulatory bodies such as the US Food and Drug Administration, International Council for Harmonisation, Health Canada, European Medicines Agency, Therapeutics Goods Administration, Central Drugs Standard Control Organization, National Medical Products Administration, Pharmaceuticals and Medical Devices Agency, Ministry of Food and Drug Safety, and the World Health Organization. The standard of care for a disease may include but is not limited to surgery, radiation, chemotherapy, targeted therapy, or immunotherapy (e.g., PD1/PDL1 or CTLA4 blockade therapy).

[0120] As used herein, “pharmaceutically acceptable” has its plain and ordinary meaning as understood in light of the specification and refers to carriers, excipients, and/or stabilizers that are nontoxic to the cell or mammal being exposed thereto at the dosages and concentrations employed or that have an acceptable level of toxicity. A “pharmaceutically acceptable” “diluent,” “excipient,” and/or “carrier” as used herein have their plain and ordinary meaning as understood in light of the specification and are intended to include any and all solvents, dispersion media, coatings, antibacterial and antifungal agents, isotonic and absorption delaying agents, and the like, compatible with administration to humans, cats, dogs, or other vertebrate hosts. Typically, a pharmaceutically acceptable diluent, excipient, and/or carrier is a diluent, excipient, and/or carrier approved by a regulatory agency of a Federal, a state government, or other regulatory agency, or listed in the U.S. Pharmacopeia or other generally recognized pharmacopeia for use in animals, including humans as well as non-human mammals, such as cats and dogs. The term diluent, excipient, and/or carrier can refer to a diluent, adjuvant, excipient, or vehicle with which the pharmaceutical formulation is administered. Such pharmaceutical diluent, excipient, and/or carriers can be sterile liquids, such as water and oils, including those of petroleum, animal, vegetable, or synthetic origin. Water, saline solutions and aqueous dextrose and glycerol solutions can be employed as liquid diluents, excipients, and/or carriers, particularly for injectable solutions. Suitable pharmaceutical diluents and/or excipients include sugars, starch, glucose, fructose, lactose, sucrose, maltose, gelatin, malt, rice, flour, chalk, silica gel, sodium stearate, glycerol monostearate, talc, salts, sodium chloride, dried skim milk, glycerol, propylene, glycol, water, ethanol, and the like. A non-limiting example of a physiologically acceptable carrier is an aqueous pH buffered solution. The physiologically acceptable carrier may also comprise one or more of the following: antioxidants, such as ascorbic acid, low molecular weight (less than about 10 residues) polypeptides, proteins, such as serum albumin, gelatin, immunoglobulins, hydrophilic polymers such as polyvinylpyrrolidone, amino acids, carbohydrates such as glucose, mannose, or dextrins, chelating agents such as EDTA, sugar alcohols such as glycerol, erythritol, threitol, arabitol, xylitol, ribitol, mannitol, sorbitol, galactitol, fucitol, iditol, inositol, isomalt, maltitol, or lactitol, salt-forming counterions such as sodium, and nonionic surfactants such as TWEEN®, polyethylene glycol (PEG), and PLURONICS®. The formulation, if desired, can also contain minor amounts of wetting, bulking, emulsifying agents, or pH buffering agents. These formulations can take the form of solutions, suspensions, emulsion, sustained release formulations and the like. The formulation should suit the mode of administration.

[0121] Additional excipients with desirable properties include but are not limited to preservatives, adjuvants, stabilizers, solvents, buffers, diluents, solubilizing agents, detergents, surfactants, chelating agents, antioxidants, alcohols, ketones, aldehydes, ethylenediaminetetraacetic acid (EDTA), tris(hydroxymethyl)aminomethane (Tris), citric acid, ascorbic acid, acetic acid, salts, phosphates, citrates, acetates, succinates, chlorides, bicarbonates, borates, sulfates, sodium chloride, sodium bicarbonate, sodium phosphate, sodium borate, sodium citrate, potassium chloride, potassium phosphate, magnesium sulfate sugars, dextrose, dextran 40, fructose, mannose, lactose, trehalose, galactose, sucrose, sorbitol, mannitol, cellulose, serum, amino acids, alanine, arginine, asparagine, aspartic acid, cysteine, glutamine, glutamic acid, glycine, histidine, isoleucine, leucine, lysine, methionine, phenylalanine, proline, serine, threonine, tryptophan, tyrosine, valine, polysorbate 20, polysorbate 40, polysorbate, 60, polysorbate 80, poloxamer, poloxamer 188, sodium deoxycholate, sodium taurodeoxycholate, magnesium stearate, octylphenol ethoxylate, benzethonium chloride, thimerosal, gelatin, esters, ethers, 2-phenoxyethanol, urea, or vitamins, or any combination thereof. Some excipients may be in residual amounts or contaminants from the process of manufacturing, including but not limited to serum, albumin, ovalbumin, antibiotics, inactivating agents, formaldehyde, glutaraldehyde, β-propiolactone, gelatin, cell debris, nucleic acids, peptides, amino acids, or growth medium components or any combination thereof. The amount of the excipient may be found in the formulation at a percentage that is, is about, is at least, is at least about, is not more than, or is not more than about, 0%, 0.1%, 0.2%, 0.3%, 0.4%, 0.5%, 0.6%, 0.7%, 0.8%, 0.9%, 1%, 2%, 3%, 4%, 5%, 6%, 7%, 8%, 9%, 10%, 20%, 30%, 40%, 50%, 60%, 70%, 80%, 90%, 95%, 100% w/w or any percentage by weight in a range defined by any two of the aforementioned numbers.

[0122] The term “purity” of any given substance, compound, or material as used herein refers to the actual abundance of the substance, compound, or material relative to the expected abundance. For example, the substance, compound, or material may be at least 80, 85, 90, 91, 92, 93, 94, 95, 96, 97, 98, 99, or 100% pure, including all decimals in between. Purity may be affected by unwanted impurities, including but not limited to side products, isomers, enantiomers, degradation products, solvent, carrier, vehicle, or contaminants, or any combination thereof. Purity can be measured technologies including but not limited to chromatography, liquid chromatography, gas chromatography, spectroscopy, UV-visible spectrometry, infrared spectrometry, mass spectrometry, nuclear magnetic resonance, gravimetry, or titration, or any combination thereof.

[0123] The term “pharmaceutically acceptable salts” has its plain and ordinary meaning as understood in light of the specification and includes relatively non-toxic, inorganic and organic acid, or base addition salts of compositions or excipients, including without limitation, analgesic agents, therapeutic agents, other materials, and the like. Examples of pharmaceutically acceptable salts include those derived from mineral acids, such as hydrochloric acid and sulfuric acid, and those derived from organic acids, such as ethanesulfonic acid, benzenesulfonic acid, p-toluenesulfonic acid, and the like. Examples of suitable inorganic bases for the formation of salts include the hydroxides, carbonates, and bicarbonates of ammonia, sodium, lithium, potassium, calcium, magnesium, aluminum, zinc, and the like. Salts may also be formed with suitable organic bases, including those that are non-toxic and strong enough to form such salts. For example, the class of such organic bases may include but are not limited to mono-, di-, and trialkylamines, including methylamine, dimethylamine, and triethylamine; mono-, di-, or trihydroxyalkylamines including mono-, di-, and triethanolamine; amino acids, including glycine, arginine and lysine; guanidine; N-methylglucosamine; N-methylglucamine; L-glutamine; N-methylpiperazine; morpholine; ethylenediamine; N-benzylphenethylamine; trihydroxymethyl aminoethane.

[0124] The term “% w/w” or “% wt/wt” means a percentage expressed in terms of the weight of the ingredient or agent over the total weight of the composition multiplied by 100.

### EXEMPLARY EMBODIMENTS

[0125] FIG. 1 is a flowchart depicting some embodiments of a method of treating microglia mediated inflammation.

[0126] In some embodiments, a method of treating microglia mediated inflammation 100 in a subject in need thereof is disclosed. In some embodiments, the method comprises: identifying a subject as having or at risk of having microglia mediated inflammation 101 and administering a therapeutically effective amount of an anti-Gal3 antibody to the subject, wherein administration of the antibody to the subject alleviates one or more symptoms of microglia mediated inflammation 103. The anti-Gal3 antibody may be administered through any effective means, for example, intravenously, intraperitoneally, or topically. In some embodiments, the microglia mediated inflammation is related to AMD and/or glaucoma. In some embodiments, identifying a subject at risk of having microglia mediated inflammation may comprise identifying the subject as at risk of having AMD and/or glaucoma. In some embodiments, administration of the anti-Gal3 antibody to the subject may relieve one or more symptoms associated with AMD or glaucoma. The anti-Gal3 antibody may be administered through any effective means, for example, intraperitoneally or topically. In some embodiments the anti-Gal3 antibody comprises TB001, TB006, or a fragment thereof.

[0127] Some embodiments herein are directed to a method of treating one or more diseases associated with microglia mediated inflammation in a subject in need thereof, the method comprising: identifying a subject as having or at risk of having one or more diseases associated with microglia mediated inflammation, and administering a therapeutically effective amount of an anti-Gal3 antibody to the subject, wherein administration of the antibody to the subject alleviates one or more symptoms of a disease microglia mediated inflammation.

[0128] FIG. 2 is a flowchart depicting some embodiments of a method of treating one or more diseases associated with microglia mediated inflammation.

[0129] In some embodiments, a method of treating one or more diseases associated with microglia mediated inflammation 200 in a subject in need thereof is disclosed. In some embodiments, the method comprises identifying a subject as having or at risk of having one or more diseases associated with microglia mediated inflammation 201 and administering a therapeutically effective amount of an anti-Gal3 antibody to the subject 202, wherein administration of the antibody to the subject alleviates one or more symptoms of a disease microglia mediated inflammation 203. The anti-Gal3 antibody may be administered through any effective means, for example, intraperitoneally or topically. In some embodiments the anti-Gal3 antibody comprises TB001, TB006, or a fragment thereof. In some embodiments, the microglia mediated inflammation is related to AMD and/or glaucoma. In some embodiments, identifying a subject at risk of having microglia mediated inflammation may comprise identifying the subject as at risk of having AMD and/or glaucoma. In some embodiments, administration of the anti-Gal3 antibody to the subject may relieve one or more symptoms associated with AMD or glaucoma.

[0130] Some embodiments herein are directed to a method of treating an ocular surface disease in a subject in need thereof, the method comprising: identifying a subject as having or at risk of having an ocular surface disease, and administering a therapeutically effective amount of an anti-Gal3 antibody to the subject, wherein administration of the antibody to the subject alleviates one or more symptoms of ocular surface disease.

[0131] FIG. 3 is a flowchart depicting some embodiments of a method of treating an ocular surface disease.

[0132] In some embodiments, a method of treating an ocular surface disease in a subject in need thereof 300 is disclosed. In some embodiments, the method comprises identifying a subject as having or at risk of having an ocular surface disease 301 and administering a therapeutically effective amount of an anti-Gal3 antibody to the subject 302, wherein administration of the antibody to the subject alleviates one or more symptoms of the one or more ocular surface diseases 303. The anti-Gal3 antibody may be administered through any effective means, for example, intraperitonecally or topically. In some embodiments the anti-Gal3 antibody comprises TB001, TB006, or a fragment thereof. In some embodiments, the ocular surface disease comprises DED, blepharitis, neurotrophic keratitis, ocular rosacea, meibomian gland dysfunction, decreased tear quality and/or production with age, chemical or thermal burns, side effects of medical treatments or prescription medications, conjunctivitis, Sjogren's disease, allergies and other immunological conditions, or any combination thereof. Each type of ocular surface disease may have its own symptoms, although many of them include dry eyes. In some embodiments, administration of the anti-Gal3 antibody alleviates one or more symptoms of DED, blepharitis, neurotrophic keratitis, ocular rosacea, meibomian gland dysfunction, decreased tear quality and/or production with age, chemical or thermal burns, side effects of medical treatments or prescription medications, conjunctivitis, Sjogren's disease, allergies and other immunological conditions, or any combination thereof.

[0133] Some embodiments herein are directed to a method of treating age-related macular degeneration (AMD) in a subject in need thereof, the method comprising: identifying a subject as having or at risk of having AMD, and administering a therapeutically effective amount of an anti-Gal3 antibody to the subject, wherein administration of the antibody to the subject alleviates one or more symptoms of AMD.

[0134] FIG. 4 is a flowchart depicting some embodiments of a method of treating age-related macular degeneration (AMD).

[0135] In some embodiments, a method of treating age-related macular degeneration (AMD) in a subject in need thereof 400, is disclosed. In some embodiments, the method comprises identifying a subject as having or at risk of having AMD 401 and administering a therapeutically effective amount of an anti-Gal3 antibody to the subject 402, wherein administration of the antibody to the subject alleviates one or more symptoms of AMD 403. The anti-Gal3 antibody may be administered through any effective means, for example, intraperitoneally or topically. In some embodiments the anti-Gal3 antibody comprises TB001, TB006, or a fragment thereof. In some embodiments, the one or more symptoms of AMD comprises Syblurry or fuzzy vision, difficulty recognizing familiar faces, straight lines appear wavy, a dark, empty area or blind spot appears in the center of vision, or loss of central vision, difficulty driving, difficulty reading, difficulty recognizing faces, difficulty performing close-up work, drusen, or any combination thereof. In some embodiments, identification of a subject or at risk of having AMD may comprise administration of a visual acuity test, pupil dilation, fluorescein angiography, or an Amsler Grid.

[0136] Some embodiments herein are directed to a method of treating dry eye disease in a subject in need thereof, the method comprising: identifying a subject as having or at risk of having dry eye disease, and administering a therapeutically effective amount of an anti-Gal3 antibody to the subject, wherein administration of the antibody to the subject alleviates one or more symptoms of dry eye disease.

[0137] FIG. 5 is a flowchart depicting some embodiments of a method of treating dry eye disease (DED).

[0138] In some embodiments, a method of treating dry eye disease in a subject in need thereof 500, is disclosed. In some embodiments, the method comprises identifying a subject as having or at risk of having dry eye disease 501 and administering a therapeutically effective amount of an anti-Gal3 antibody to the subject 502, wherein administration of the antibody to the subject alleviates one or more symptoms of dry eye disease 503. The anti-Gal3 antibody may be administered through any effective means, for example, intraperitoneally or topically. In some embodiments the anti-Gal3 antibody comprises TB001, TB006, or a fragment thereof. In some embodiments, symptoms of DED may comprise a stinging or burning feeling in the eyes, eye redness, watery eyes, blurred vision, stringy mucus in or around the eyes, difficulty wearing contact lenses, or difficulty driving. In some embodiments, identification of a subject as having or at risk of having DED comprises identifying a subject as being older than 50, being a woman, eating a diet that is low in vitamin A, wearing contact lenses or having a history of refractive surgery, or any combination thereof.

[0139] Some embodiments herein are directed to a method of treating microvascular dysfunction in a subject in need thereof, the method comprising: identifying a subject as having or at risk of having microvascular dysfunction, and administering a therapeutically effective amount of an anti-Gal3 antibody to the subject, wherein administration of the antibody to the subject alleviates one or more symptoms of microvascular dysfunction. In some embodiments, symptoms of microvascular disfunction may comprise a stinging or burning feeling in the eyes, eye redness, watery eyes, blurred vision, stringy mucus in or around the eyes, difficulty wearing contact lenses, or difficulty driving. In some embodiments, identification of a subject as having or at risk of having microvascular disfunction comprises identifying a subject as being older than 50, being a woman, eating a diet that is low in vitamin A, wearing contact lenses or having a history of refractive surgery, or any combination thereof.

[0140] FIG. 6 is a flowchart depicting some embodiments of a method of treating microvascular dysfunction.

[0141] In some embodiments, a method of treating microvascular dysfunction in a subject in need thereof 600, is disclosed. In some embodiments, the method comprises identifying a subject as having or at risk of having microvascular dysfunction 601 and administering a therapeutically effective amount of an anti-Gal3 antibody to the subject 602, wherein administration of the antibody to the subject alleviates one or more symptoms of microvascular dysfunction 603. The anti-Gal3 antibody may be administered through any effective means, for example, intraperitoneally or topically. In some embodiments the anti-Gal3 antibody comprises TB001, TB006, or a fragment thereof.

[0142] Some embodiments herein are directed to a method of treating tear dysfunction in a subject in need thereof, the method comprising: identifying a subject as having or at risk of having tear dysfunction, and administering a therapeutically effective amount of an anti-Gal3 antibody to the subject, wherein administration of the anti-Gal3 antibody to the subject alleviates on or more symptoms of tear dysfunction.

[0143] FIG. 7 is a flowchart depicting some embodiments of a method of treating tear dysfunction.

[0144] In some embodiments, a method of treating tear dysfunction in a subject in need thereof 700, is disclosed. In some embodiments, the method comprises identifying a subject as having or at risk of having tear dysfunction 701, administering a therapeutically effective amount of an anti-Gal3 antibody to the subject 702, wherein administration of the anti-Gal3 antibody to the alleviates one or more symptoms of tear dysfunction 703. The anti-Gal3 antibody may be administered through any effective means, for example, intraperitoneally or topically. In some embodiments the anti-Gal3 antibody comprises TB001, TB006, or a fragment thereof. In some embodiments, the tear dysfunction comprises decreased tear formation and/or decreased tear stability. In some embodiments, the method further comprises measuring tear formation. In some embodiments, the method further comprises measuring tear stability. In some embodiments, the method further comprises measuring tear evaporation. In some embodiments, formation and/or stability is measured by tear clearance/fluorophotometry, Schirmer strips, phenol red threads, or any combination thereof. In some embodiments, symptoms of tear dysfunction may comprise a stinging or burning feeling in the eyes, eye redness, watery eyes, blurred vision, stringy mucus in or around the eyes, difficulty wearing contact lenses, difficulty driving, corneal nerve de-sensitivity caused by contact lens use, nerve damage or laser eye surgery, or any combination thereof. In some embodiments, identifying a subject as having or at risk of having tear disfunction comprises detecting one or more risk factors of tear dysfunction. In some embodiments, the one or more risk factors comprises Sjogren's syndrome, allergic eye disease, rheumatoid arthritis, lupus, scleroderma, graft vs. host disease, sarcoidosis, thyroid disorders or vitamin A deficiency, antihistamines, decongestants, hormone replacement therapy, antidepressants, and medicines for high blood pressure, acne, birth control and Parkinson's disease, being older than 50, being a woman, eating a diet that is low in vitamin A, wearing contact lenses or having a history of refractive surgery, or any combination thereof.

[0145] Some embodiments herein are directed to a method of decreasing corneal sensitivity in a subject, the method comprising: administering a therapeutically effective amount of an anti-Gal3 antibody to the subject, wherein administration of the anti-Gal3 antibody to the subject's eye decreases corneal sensitivity in the subject as corneal sensitivity in the subject prior to administration of the antibody.

[0146] FIG. 8 is a flowchart depicting some embodiments of a method of decreasing corneal sensitivity.

[0147] In some embodiments, a method of decreasing corneal sensitivity in a subject 800, is disclosed. In some embodiments, the method comprises identifying a subject as likely to benefit from reduced corneal sensitivity 801, administering a therapeutically effective amount of an anti-Gal3 antibody to the subject 802, wherein administration of the anti-Gal3 antibody to the subject decreases corneal sensitivity in the subject as corneal sensitivity in the subject prior to administration of the antibody 803. The anti-Gal3 antibody may be administered through any effective means, for example, intraperitoneally or topically. In some embodiments the anti-Gal3 antibody comprises TB001, TB006, or a fragment thereof. In some embodiments, the method further comprises measuring corneal sensitivity before and or after administration of the anti-Gal3 antibody. In some embodiments, measuring corneal sensitivity comprises measuring a subject's mechanical, thermal, and/or chemical corneal sensitivity. In some embodiments, measuring corneal sensitivity comprises an esthesiometer, or a Cochet-Bonnet aesthesiometer. In some embodiments, measurement of corneal sensitivity comprises a Von Frey test.

[0148] Some embodiments herein are directed to a method of treating cataracts in a subject in need thereof, the method comprising: identifying a subject as having or at risk of having cataracts, and administering a therapeutically effective amount of an anti-Gal3 antibody to the subject, wherein administration of the antibody to the subject reduces the severity of the subject's cataracts as compared to the severity of cataracts in the subjects prior to administration of the anti-Gal3 antibody.

[0149] FIG. 9 is a flowchart depicting some embodiments of a method of treating cataracts.

[0150] In some embodiments, a method of treating cataracts in a subject in need thereof 1000, is disclosed. In some embodiments, the method comprises identifying a subject as having or at risk of having cataracts 901, and administering a therapeutically effective amount of an anti-Gal3 antibody to the subject 902, wherein administration of the antibody to the subject reduces the severity of the subject's cataracts as compared to the severity of cataracts in the subjects prior to administration of the anti-Gal3 antibody 903. The anti-Gal3 antibody may be administered through any effective means, for example, intraperitoneally or topically. In some embodiments the anti-Gal3 antibody comprises TB001, TB006, or a fragment thereof. In some embodiments, administration of the anti-Gal3 antibody may alleviate one or more symptoms of cataracts, including, for example, cloudy or blurry vision, colors appearing faded, poor night vision, sensitivity to lamps, sunlight, headlights, or other light, the appearance of a halo around lights, double vision, or the need to alter eye glass or contact lens prescription often. In some embodiments, the method further comprises assessing the severity of the subject's cataracts prior to and or after administration of the anti-Gal3 antibody. In some embodiments, the subject has stage 1, 2, 3, 4, 5, or 6 cataracts.

[0151] Some embodiments herein are directed to a method of preventing or reducing cataract formation in a subject in need thereof, the method comprising: identifying a subject as having or at risk of having cataracts, and administering a therapeutically effective amount of an anti-Gal3 antibody to the subject, wherein administration of the antibody to the subject reduces or prevents cataract formation in the subject acts as compared to formation of cataracts in the subjects prior to administration of the anti-Gal3 antibody.

[0152] FIG. 10 is a flowchart depicting some embodiments of a method of preventing or reducing cataract formation.

[0153] In some embodiments, a method of preventing or reducing cataract formation in a subject in need thereof 1000, is disclosed. In some embodiments, the method comprises identifying a subject as having or at risk of having cataracts 1001, and administering a therapeutically effective amount of an anti-Gal3 antibody to the subject 1002, wherein administration of the antibody to the subject reduces or prevents cataract formation in the subject acts as compared to formation of cataracts in the subjects prior to administration of the anti-Gal3 antibody 1003. In some embodiments, the method further comprises evaluating cataract severity. The anti-Gal3 antibody may be administered through any effective means, for example, intraperitoneally or topically. In some embodiments the anti-Gal3 antibody comprises TB001, TB006, or a fragment thereof.

[0154] Some embodiments herein are directed to a method of treating diabetic retinopathy in a subject in need thereof, the method comprising: identifying a subject as having or at risk of having diabetic retinopathy, and administering a therapeutically effective amount of an anti-Gal3 antibody to the subject, wherein administration of the antibody to the subject alleviates one or more symptoms of diabetic retinopathy.

[0155] FIG. 11 is a flowchart depicting some embodiments of a method of treating diabetic retinopathy.

[0156] In some embodiments, a method of treating diabetic retinopathy in a subject in need thereof 1100, is disclosed. In some embodiments, the method comprises identifying a subject as having or at risk of having diabetic retinopathy 1101 and administering a therapeutically effective amount of an anti-Gal3 antibody to the subject 1102, wherein administration of the antibody to the subject alleviates one or more symptoms of diabetic retinopathy 1103. The anti-Gal3 antibody may be administered through any effective means, for example, intraperitoneally or topically. In some embodiments the anti-Gal3 antibody comprises TB001, TB006, or a fragment thereof. In some embodiments, the subject has or is at risk of having advanced diabetic retinopathy or proliferative diabetic retinopathy. In some embodiments, the subject has or is at risk of having early diabetic retinopathy or non-proliferative diabetic retinopathy. In some embodiment the one or more symptoms of diabetic retinopathy comprise spots or dark strings floating in a subject's vision (“floaters”), blurred vision, fluctuating vision, dark or empty areas in a subject's vision, vision loss, blindness, or any combination thereof. In some embodiments, the identification of a subject as having or at risk of having diabetic retinopathy comprises identifying the subject as having one or more risk factors for diabetic retinopathy. In some embodiments, the one or more risk factors comprise diabetes, poor control of blood sugar level, high blood pressure, high cholesterol, pregnancy, tobacco use, ethnic predisposition, genetic predisposition, or any combination thereof.

[0157] Some embodiments herein are directed to a method of treating retinal drusen in a subject in need thereof, the method comprising: identifying a subject as having or at risk of having retinal drusen, and administering a therapeutically effective amount of an anti-Gal3 antibody to the subject, wherein administration of the antibody to the subject reduces retinal drusen in the subject as compared to retinal drusen in the subject prior to administration of the anti-Gal3 antibody.

[0158] FIG. 12 is a flowchart depicting some embodiments of a method of treating retinal drusen.

[0159] In some embodiments, a method of treating retinal drusen in a subject in need thereof 1200, is disclosed. In some embodiments, the method comprises identifying a subject as having or at risk of having retinal drusen 1201 and administering a therapeutically effective amount of an anti-Gal3 antibody to the subject 1202, wherein administration of the antibody to the subject reduces retinal drusen in the subject as compared to retinal drusen in the subject prior to administration of the anti-Gal3 antibody 1203. The anti-Gal3 antibody may be administered through any effective means, for example, intraperitoneally or topically. In some embodiments the anti-Gal3 antibody comprises TB001, TB006, or a fragment thereof.

[0160] In some embodiments, the subject has a decreased palpebral opening as compared to a subject with normal eyes. In some embodiments, the subject's palpebral opening is decreased by about 1, 2, 3, 4, 5, 6, 7, 8, 9, 10, 15, 20, 25, 30, 40, 50, 60, 70, 75, 80, 90, or 100%, decreased as compared to a subject with normal eyes, or is decreased by a range that is defined by any two of the preceding values. For example, in some embodiments, the subject's palpebral opening is decreased by between about 1-100, 1-90, 1-75, 1-50, 1-25, 1-10, 1-5, 5-100, 5-90, 5-75, 5-50, 5-25 5-10, 10-100, 10-90, 10-75, 10-50, 10-25, 25-100, 25-90, 25-75, 25-50, 50-100, 50-90, 50-75, 75-100, 75-90, or 90-100%, as compared to a subject with normal eyes.

[0161] In some embodiments, the subject's palpebral opening increases following administration of anti-Gal3 antibody. In some embodiments, the subject's palpebral opening increases by about 1, 2, 3, 4, 5, 6, 7, 8, 9, 10, 15, 20, 25, 30, 40, 50, 60, 70, 75, 80, 90, or 100%, following administration of an anti-Gal3 antibody, or is increased by a range that is defined by any two of the preceding values. For example, in some embodiments, the subject's palpebral opening is increased by between about 1-100, 1-90, 1-75, 1-50, 1-25, 1-10, 1-5, 5-100, 5-90, 5-75, 5-50, 5-25 5-10, 10-100, 10-90, 10-75, 10-50, 10-25, 25-100, 25-90, 25-75, 25-50, 50-100, 50-90, 50-75, 75-100, 75-90, or 90-100%, following administration of the anti-Gal3 antibody.

[0162] In some embodiments, corneal sensitivity is measured by a von Frey test. In some embodiments, the subject has a corneal sensitivity that is about 1, 2, 3, 4, 5, 7, 8, 9, 10, 15, 20, 25, 30, 40, 50, 60, 70, 75, 80, 90, or 100%, or a range that is defined by any two of the preceding values, higher than corneal sensitivity of normal eyes. For example, in some embodiments, the subject's corneal sensitivity is about 1-100, 1-90, 1-75, 1-50, 1-25, 1-10, 1-5, 5-100, 5-90, 5-75, 5-50, 5-25 5-10, 10-100, 10-90, 10-75, 10-50, 10-25, 25-100, 25-90, 25-75, 25-50, 50-100, 50-90, 50-75, 75-100, 75-90, or 90-100%, more sensitive as compared to a subject with normal eyes.

[0163] In some embodiments, the subject's corneal sensitivity is decreased following administration of the anti-Gal3 antibody. In some embodiments, the subject's corneal sensitivity is decreased by about 1, 2, 3, 4, 5, 6, 7, 8, 9, 10, 15, 20, 25, 30, 40, 50, 60, 70, 75, 80, 90, or 100%, or by a range that is defined by any two of the preceding values, as compare to the subject's corneal sensitivity corneal sensitivity prior to administration of the anti-Gal3 antibody or fragment thereof. For example, in some embodiments, the subject's corneal sensitivity is decreased by between about 1-100, 1-90, 1-75, 1-50, 1-25, 1-10, 1-5, 5-100, 5-90, 5-75, 5-50, 5-25 5-10, 10-100, 10-90, 10-75, 10-50, 10-25, 25-100, 25-90, 25-75, 25-50, 50-100, 50-90, 50-75, 75-100, 75-90, or 90-100%, as compared to the subject's corneal sensitivity prior to administration of the anti-Gal3 antibody. In some embodiments, the subject's corneal sensitivity is decreased by about 0.001, 0.005, 0.01, 0.02, 0.03, 0.04, 0.05, 0.06, 0.07, 0.08, 0.09, 0.1, 0.11. 0.12, 0.13, 0.14, 0.15, 0.16, 0.17, 0.18, 0.19, or 0.2 g, or by a range that is defined by any two of the preceding values, as compared to the subject's corneal sensitivity prior to administration of the anti-Gal3 antibody. For example, in some embodiments, the subject's corneal sensitivity is decreased by between about 0.001-0.2, 0.001-0.15, 0.001-0.1, 0.001-0.05, 0.001-0.01, 0.001-0.005, 0.005-0.2, 0.005-0.15, 0.005-0.1, 0.005-0.05, 0.005-0.01, 0.01-0.2, 0.01-0.15, 0.01-0.1, 0.01-0.05, 0.05-0.2, 0.05-0.15, 0.05-0.1, 0.1-0.2, 0.1-0.15, or 0.15-0.2 g, as compared to the subject's corneal sensitivity prior to administration of the anti-Gal3 antibody.

[0164] In some embodiments, the methods disclosed herein comprise measuring a subject's tear formation. In some embodiments, the subject's tear formation is measured using a Schirmer's test. In some embodiments, the subject's tear formation is increased by about 1, 2, 3, 4, 5, 7, 8, 9, 10, 15, 20, 25, 30, 40, 50, 60, 70, 75, 80, 90, 100, 250, 500, 750, or 1000%, or by a range that is defined by any two of the preceding values, following administration of the anti-GAl3 antibody. For example, in some embodiments, the subject's tear formation is increased by between about 1-1000, 1-750, 1-500, 1-250, 1-100, 1-75, 1-50, 1-25, 1-20, 1-5, 5-1000, 5-750, 5-500, 5-250, 5-100, 5-75, 5-50, 5-25, 5-10, 10-1000, 10-750, 10-500, 10-250, 10-100, 10-75, 10-50, 10-25, 25-1000, 25-750, 25-500, 25-250, 25-100, 25-75, 25-50, 50-1000, 50-750, 50-500, 50-250, 50-100, 100-1000, 100-750, 100-500, 100-250, 250-1000, 250-0750, 250-500, 500-1000, 500-750, or 750-1000%, following administration of the anti-Gal3 antibody. In some embodiments, the subject's tear formation is increased by about 1, 2, 3, 4, 5, 6, 7, 8, 9, 10, 15, 20, 25, 30, 35, 40, 45, or 50 mm/60 s, or by a range that is defined by any two of the preceding values, following administration of the anti-Gal3 antibody or binding fragment thereof. For example, in some embodiments, the subject's tear formation is increased by between about 1-50, 1-40, 1-30, 1-25, 1-20, 1-10, 1-5, 5-50, 5-40, 5-30, 5-25, 5-10, 10-50, 10-40, 10-30, 10-25, 25-50, 25-40, 25-30, 30-50, 30-40, or 40-50 mm/60 s, following administration of the anti-Gal3 antibody.

[0165] In some embodiments, the subject is identified as having stage 1, 2, 3, 4, 5, or 6 cataracts prior to administration of the anti-Gal3 antibody. In some embodiments, the severity of the subject's cataracts is decreased by about 1, 2, 3, 4, 5 or 6 stages, or by a range that is defined by any two of the preceding values, as compared to the severity of the subject's cataracts prior to administration of the anti-Gal3 antibodies. For example, in some embodiments, the severity of the subject's cataracts is decreased by 1-6, 1-5, 1-4, 1-3, 1-2, 2-6, 2-5, 2-4, 2-3, 3-6, 3-5, 3-4, 4-6, 4-5, or 5-6 stages, following administration of the anti-Gal3 antibody as compared to the severity of the subject's cataracts prior to administration of the anti-Gal3 antibody. In some embodiments, administration of the anti-Gal3 antibody prevents the subject's cataracts from advancing to a more sever stage following administration of the anti-Gal3 antibody.

[0166] FIG. 25 shows images of some embodiments of cataract staging in mice with normal eyes and mice with dry eye disease (DED).

[0167] In some embodiments, the anti-Gal3 antibody is administered intraperitoneally.

[0168] In some embodiments, the anti-Gal3 antibody is administered topically.

[0169] In some embodiments, the anti-Gal3 antibody is administered intravenously.

[0170] In some embodiments, the anti-Gal3 antibody is administered daily, twice daily, weekly, bi-weekly, monthly, bimonthly, quarterly, and/or yearly.

[0171] In some embodiments, the anti-Gal3 antibody is administered for up to about 1, 2, 3, 4, 5, 6, 7, 8, 9, 10, 11, or 12 weeks, or for an amount of time that is in a range defined by any two of the preceding values. For example, in some embodiments, the anti-Gal3 antibody is administered for between bout 1 and 12, 1 and 10, 1 and 8, 1 and 6, 1 and 4, 1 and 2, 2 and 12, 2 and 10, 2 and 8, 2 and 6, 2 and 4, 4 and 12, 4 and 10, 4 and 8, 4 and 6, 6 and 12, 6 and 10, 6 and 8, 8 and 12, 8 and 10, or 10 and 12 weeks. In some embodiments, the anti-Gal3 antibody is administered for longer than 12 weeks. In some embodiments, the anti-Gal3 antibody is administered on an ongoing basis.

[0172] In some embodiments, the anti-Gal3 antibody is TB001 or a binding fragment thereof.

[0173] In some embodiments, the anti-Gal3 antibody is selected from the group consisting of at least one of: TB001, TB006, 12G5.D7, 13A12.2E5, 14H10.2C9, 15F10.2D6, 19B5.2E6, 20D11.2C6, 20H5.A3, 23H9.2E4, 2D10.2B2, 3B11.2G2, 7D8.2D8, mIMT001, 4A11.2B5, 4A11.H1L1, 4A11.H4L2, 4G2.2G6, 6B3.2D3, 6H6.2D6, 9H2.2H10, 13G4.2F8, 13H12.2F8, 15G7.2A7, 19D9.2E5, 23B10.2B12, 24D12.2H9, F846C.1B2, F846C.1F5, F846C.1H12, F846C.1H5, F846C.2H3, F846TC.14A2, F846TC.14E4, F846TC.16B5, F846TC.7F10, F847C.10B9, F847C.11B1, F847C.12F12, F847C.26F5, F847C.4B10, F849C.8D10, F849C.8H3, 846.2B11, 846.4D5, 846T.1H2, 847.14H4, 846.2D4, 846.2F11, 846T.10B1, 846T.2E3, 846T.4C9, 846T.4E11, 846T.4F5, 846T.8D1, 847.10C9, 847.11D6, 847.15D12, 847.15F9, 847.15H11, 847.20H7, 847.21B11, 847.27B9, 847.28D1, 847.2B8, 847.3B3, 849.1D2, 849.2D7, 849.2F12, 849.4B2, 849.4F12, 849.4F2, 849.5C2, 849.8D12, F847C.21H6, 849.5H1, 847.23F11, 847.16D10, 847.13E2-mH0mL1, 847.13E2-mH0mL2, 847.12C4, 847.4D3, 2D10-VH0-VL0, 2D10-hVH4-HVL1, 2D10-hVH4-HVL2, 2D10-hVH4-HVL3, 2D10-hVH4-HVL4, 2D10-hVH3-HVL1, 2D10-hVH3-HVL2, 2D10-hVH3-HVL3, 2D10-hVH3-HVL4, 20H5.A3-VH3VL1, 20H5.A3-VH3VL3, 20H5.A3-VH4VL1, 20H5.A3-VH5VL1, 20H5.A3-VH5VL3, 20H5.A3-VH6VL1, 20H5.A3-VH6VL3, 2D10-VH0-VL0, 2D10-hVH4-HVL1, 2D10-hVH4-HVL2, 2D10-hVH4-HVL3, 2D10-hVH4-HVL4, 2D10-hVH3-HVL1, 2D10-hVH3-HVL2, 2D10-hVH3-HVL3, 2D10-hVH3-HVL4, 21H6-H0L0, 21H6-H1L1, 21H6-H1L2, 21H6-H1L3, 21H6-H1L4, 21H6-H2L1, 21H6-H2L2, 21H6-H2L3, 21H6-H2L4, 21H6-H3L1, 21H6-H3L2, 21H6-H3L3, 21H6-H3L4, 21H6-H4L1, 21H6-H4L2, 21H6-H4L3, 21H6-H4L4, 21H6-H5L1, 21H6-H5L2, 21H6-H5L3, 21H6-H5L4, 21H6-H6L1, 21H6-H6L2, 21H6-H6L3, 21H6-H6L4, or binding fragment thereof.

[0174] In some embodiments, the antibody comprises (1) a heavy chain variable region comprising a VH-CDR1, a VH-CDR2, and a VH-CDR3; and (2) a light chain variable region comprising a VL-CDR1, a VL-CDR2, and a VL-CDR3, wherein the antibody comprises at least 1 VL-CDR having at least 90% identity to any one of the amino acid sequences of SEQ ID NOs: 170-296, 1814-1864.

[0175] In some embodiments, the antibody comprises (1) a heavy chain variable region comprising a VH-CDR1, a VH-CDR2, and a VH-CDR3; and (2) a light chain variable region comprising a VL-CDR1, a VL-CDR2, and a VL-CDR3, wherein the antibody comprises at least 3 VL-CDR having at least 90% identity to any one of the amino acid sequences of SEQ ID Nos: 170-296, 1814-1864.

[0176] In some embodiments, the antibody comprises (1) a heavy chain variable region comprising a VH-CDR1, a VH-CDR2, and a VH-CDR3; and (2) a light chain variable region comprising a VL-CDR1, a VL-CDR2, and a VL-CDR3, wherein the antibody comprises at least 1 VH-CDR having at least 90% identity to any one of the amino acid sequences of SEQ ID NOs: 27-169, 801, 802, 953, 954, 1763-1813.

[0177] In some embodiments, the antibody comprises (1) a heavy chain variable region comprising a VH-CDR1, a VH-CDR2, and a VH-CDR3; and (2) a light chain variable region comprising a VL-CDR1, a VL-CDR2, and a VL-CDR3, wherein the antibody comprises at least 3 VH-CDRs having at least 90% identity to any one of the amino acid sequences of SEQ ID NOs: 27-169, 801, 802, 953, 954, 1763-1813.

[0178] In some embodiments, the antibody comprises at least 1 CDR having at least 90% identity to any one of the amino acid sequences of SEQ ID NOs: 27-296, 801, 802, 953, 954, 1763-1813.

[0179] In some embodiments, the antibody comprises at least 6 CDRs having at least 90% identity to any one of the amino acid sequences of SEQ ID NOs: 27-296, 801, 802, 953, 954, 1763-1864.

[0180] In some embodiments, the antibody comprises (1) a heavy chain variable region comprising a VH-CDR1, a VH-CDR2, and a VH-CDR3; and (2) a light chain variable region comprising a VL-CDR1, a VL-CDR2, and a VL-CDR3, wherein the VH-CDR1 comprises an amino acid sequence having at least 90% identity to any one of the amino acid sequences of SEQ ID NOs: 27-70, 1763-1779; the VH-CDR2 comprises an amino acid sequence having at least 90% identity to any one of the amino acid sequences of SEQ ID NOS: 71-111, 801, 951, 952, 1780-1796; the VH-CDR3 comprises an amino acid sequence having at least 90% identity to any one of the amino acid sequences of SEQ ID NO: 112-169, 802, 953, 954, 1797-1813; the VL-CDR1 comprises an amino acid sequence having at least 90% identity to any one of the amino acid sequences of SEQ ID NOs: 170-220, 1814-1830; the VL-CDR2 comprises an amino acid sequence having at least 90% identity to any one of the amino acid sequences of SEQ ID NOs: 221-247, 1831-1847; and the VL-CDR3 comprises an amino acid sequence having at least 90% identity to any one of the amino acid sequences of SEQ ID NOs: 248-296. 1848-1864.

[0181] In some embodiments, the antibody comprises a combination of the VH-CDR1, VH-CDR2, VH-CDR3, VL-CDR1, VL-CDR2, and VL-CDR3 as illustrated in FIG. 30.

[0182] In some embodiments, the heavy chain variable region comprises a sequence having at least 90% identity to the sequence selected from SEQ ID NOs: 297-373, 803, 806-820, 940, 955-968, 1067-1109, 1415-1439, 1882-1898.

[0183] In some embodiments, the light chain variable region comprises a sequence having at least 90% identity to the sequence selected from SEQ ID NOs: 374-447, 821-835, 941-943, 969-982, 1110-1152, 1440-1464, 1899-1914, 1921.

[0184] In some embodiments, the antibody comprises a heavy chain, wherein the heavy chain comprises a sequence having at least 90% identity to the sequence selected from SEQ ID NOs: 448-494, 804, 836-850, 983-996, 1153-1195, 1411, 1465-1489, 1679-1694.

[0185] In some embodiments, the antibody comprises a light chain, wherein the light chain comprises a sequence having at least 90% identity to the sequence selected from SEQ ID NOs: 495-538, 805, 851-865, 997-1010, 1196-1238, 1412, 1490-1514, 1713-1728.

[0186] In some embodiments, the antibody comprises (1) a heavy chain variable region comprising a VH-CDR1, a VH-CDR2, and a VH-CDR3; and (2) a light chain variable region comprising a VL-CDR1, a VL-CDR2, and a VL-CDR3, wherein the VH-CDR1 comprises an amino acid sequence having at least 90% identity to SEQ ID NO: 27; the VH-CDR2 comprises an amino acid sequence having at least 90% identity to SEQ ID NO: 71; the VH-CDR3 comprises an amino acid sequence having at least 90% identity to SEQ ID NO: 112; the VH-CDR1 comprises an amino acid sequence having at least 90% identity to SEQ ID NO: 170; the VH-CDR1 comprises an amino acid sequence having at least 90% identity to SEQ ID NO: 221; and the VH-CDR1 comprises an amino acid sequence having at least 90%, to SEQ ID NO: 248.

[0187] In some embodiments, the antibody comprises (1) a heavy chain variable region comprising a VH-CDR1, a VH-CDR2, and a VH-CDR3; and (2) a light chain variable region comprising a VL-CDR1, a VL-CDR2, and a VL-CDR3, wherein the antibody comprises at least 3 VH-CDRs having at least 90% identity to any one of the amino acid sequences of SEQ ID NOs: 27, 71, 112.

[0188] In some embodiments, the antibody comprises (1) a heavy chain variable region comprising a VH-CDR1, a VH-CDR2, and a VH-CDR3; and (2) a light chain variable region comprising a VL-CDR1, a VL-CDR2, and a VL-CDR3, wherein the antibody comprises at least 3 VH-CDRs having at least 90% identity to any one of the amino acid sequences of SEQ ID NOs: 170, 221, 248.

[0189] In some embodiments, the heavy chain variable region comprises a sequence having at least 90% identity to SEQ ID NO: 297.

[0190] In some embodiments, the heavy chain variable region comprises a sequence having at least 90% identity to SEQ ID NO: 374.

[0191] In some embodiments, the antibody comprises a heavy chain, wherein the heavy chain comprises a sequence having at least 90% identity to SEQ ID NO: 448. In some embodiments, the heavy chain further comprises a signal peptide. In some embodiments, the heavy chain further comprises a signal peptide having at least 90% identity to SEQ ID NO: 1922. In some embodiments, the heavy chain further comprises a signal peptide that is SEQ ID NO: 1922.

[0192] In some embodiments, the antibody comprises a light chain, wherein the light chain comprises a sequence having at least 90% identity to SEQ ID NO: 495. In some embodiments, the light chain further comprises a signal peptide. In some embodiments, the light chain further comprises a signal peptide having at least 90% identity to SEQ ID NO: 1923 or SEQ ID NO: 1924. In some embodiments, the light chain further comprises a signal peptide that is SEQ ID NO: 1923. In some embodiments, the light chain further comprises a signal peptide that is SEQ ID NO: 1924.

[0193] In some embodiments, the antibody comprises (1) a heavy chain variable region comprising a VH-CDR1, a VH-CDR2, and a VH-CDR3; and (2) a light chain variable region comprising a VL-CDR1, a VL-CDR2, and a VL-CDR3, wherein the VH-CDR1 comprises an amino acid sequence having at least 90% identity to SEQ ID NO: 31; the VH-CDR2 comprises an amino acid sequence having at least 90% identity to SEQ ID NO: 72; the VH-CDR3 comprises an amino acid sequence having at least 90% identity to SEQ ID NO: 113; the VH-CDR1 comprises an amino acid sequence having at least 90% identity to SEQ ID NO: 170; the VH-CDR1 comprises an amino acid sequence having at least 90% identity to SEQ ID NO: 221; and the VH-CDR1 comprises an amino acid sequence having at least 90%, to SEQ ID NO: 248.

[0194] In some embodiments, the anti-Gal3 antibodies or binding fragments thereof comprise a heavy chain variable region comprising a V_{H}-CDR1, a V_{H}-CDR2, and a V_{H}-CDR3. In some embodiments, the anti-Gal3 antibodies or binding fragments thereof comprise a light chain variable region comprising a V_{L}-CDR1, a V_{L}-CDR2, and a V_{L}-CDR3. In some embodiments, the V_{H}-CDR1 comprises an amino acid sequence having at least 60%, 61%, 62%, 63%, 64%, 65%, 66%, 67%, 68%, 69%, 70%, 71%, 72%, 73%, 74%, 75%, 76%, 77%, 78%, 79%, 80%, 81%, 82%, 83%, 84%, 85%, 86%, 87%, 88%, 89%, 90%, 91%, 92%, 93%, 94%, 95%, 96%, 97%, 98%, 99%, or 100% sequence identity to any amino acid sequence according to SEQ ID NOs: 27-70, 1763-1779. In some embodiments, the V_{H}-CDR2 comprises an amino acid sequence having at least 60%, 61%, 62%, 63%, 64%, 65%, 66%, 67%, 68%, 69%, 70%, 71%, 72%, 73%, 74%, 75%, 76%, 77%, 78%, 79%, 80%, 81%, 82%, 83%, 84%, 85%, 86%, 87%, 88%, 89%, 90%, 91%, 92%, 93%, 94%, 95%, 96%, 97%, 98%, 99%, or 100% sequence identity to any amino acid sequence according to SEQ ID NOs: 71-111, 801, 951, 952, 1780-1796. In some embodiments, the V_{H}-CDR3 comprises an amino acid sequence having at least 60%, 61%, 62%, 63%, 64%, 65%, 66%, 67%, 68%, 69%, 70%, 71%, 72%, 73%, 74%, 75%, 76%, 77%, 78%, 79%, 80%, 81%, 82%, 83%, 84%, 85%, 86%, 87%, 88%, 89%, 90%, 91%, 92%, 93%, 94%, 95%, 96%, 97%, 98%, 99%, or 100% sequence identity to any amino acid sequence according to SEQ ID NOs: 112-169, 802, 953, 954, 1797-1813. In some embodiments, the V_{L}-CDR1 comprises an amino acid sequence having at least 60%, 61%, 62%, 63%, 64%, 65%, 66%, 67%, 68%, 69%, 70%, 71%, 72%, 73%, 74%, 75%, 76%, 77%, 78%, 79%, 80%, 81%, 82%, 83%, 84%, 85%, 86%, 87%, 88%, 89%, 90%, 91%, 92%, 93%, 94%, 95%, 96%, 97%, 98%, 99%, or 100% sequence identity to any amino acid sequence according to SEQ ID NOs: 170-220, 1814-1830. In some embodiments, the V_{L}-CDR2 comprises an amino acid sequence having at least 60%, 61%, 62%, 63%, 64%, 65%, 66%, 67%, 68%, 69%, 70%, 71%, 72%, 73%, 74%, 75%, 76%, 77%, 78%, 79%, 80%, 81%, 82%, 83%, 84%, 85%, 86%, 87%, 88%, 89%, 90%, 91%, 92%, 93%, 94%, 95%, 96%, 97%, 98%, 99%, or 100% sequence identity to any amino acid sequence according to SEQ ID NOs: 211-247, 1831-1847. In some embodiments, the VL-CDR3 comprises an amino acid sequence having at least 60%, 61%, 62%, 63%, 64%, 65%, 66%, 67%, 68%, 69%, 70%, 71%, 72%, 73%, 74%, 75%, 76%, 77%, 78%, 79%, 80%, 81%, 82%, 83%, 84%, 85%, 86%, 87%, 88%, 89%, 90%, 91%, 92%, 93%, 94%, 95%, 96%, 97%, 98%, 99%, or 100% sequence identity to any amino acid sequence according to SEQ ID NOs: 248-296, 1848-1864. In some embodiments, the antibodies comprise one or more sequences having at least 80%, 81%, 82%, 83%, 84%, 85%, 86%, 87%, 88%, 89%, 90%, 91%, 92%, 93%, 94%, 95%, 96%, 97%, 98%, 99%, or 100% identity to a VL sequence, a VH sequence, a VL/VH pairing, and/or V_{H}-CDR1, V_{H}-CDR2, V_{H}-CDR3, V_{L}-CDR1, V_{L}-CDR2, V_{L}-CDR3 (including 1, 2, 3, 4, or 5 amino acid substitutions of any one or more of these CDRs) set from the heavy chain and light chain sequences as depicted in FIG. 32.

[0195] In some embodiments, antibodies or binding fragments thereof are provided. In some embodiments, the antibodies or binding fragments thereof are anti-Gal3 antibodies or binding fragments thereof. In some embodiments, the anti-Gal3 antibodies or binding fragments thereof comprises a heavy chain variable region comprising a V_{H}-CDR1, a V_{H}-CDR2, and a V_{H}-CDR3. In some embodiments, the anti-Gal3 antibodies or binding fragments thereof comprise a light chain variable region comprising a V_{L}-CDR1, a V_{L}-CDR2, and a V_{L}-CDR3. In some embodiments, the V_{H}-CDR1 comprises an amino acid sequence having at least 0, 1, 2, 3, 4, 5, or 6 substitutions relative to any amino acid sequence according to SEQ ID Nos: 27-70, 1763-1779. In some embodiments, the V_{H}-CDR2 comprises an amino acid sequence having at least 0, 1, 2, 3, 4, 5, or 6 substitutions relative to any amino acid sequence according to SEQ ID Nos: 71-111, 801, 951, 952, 1780-1796. In some embodiments, the V_{H}-CDR3 comprises an amino acid sequence having at least 0, 1, 2, 3, 4, 5, or 6 substitutions relative to any amino acid sequence according to SEQ ID Nos: 112-169, 802, 953, 954, 1797-1813. In some embodiments, the V_{L}-CDR1 comprises an amino acid sequence having at least 0, 1, 2, 3, 4, 5, or 6 substitutions relative to any amino acid sequence according to SEQ ID Nos: 170-220, 1814-1830. In some embodiments, the V_{L}-CDR2 comprises an amino acid sequence having at least 0, 1, 2, 3, 4, 5, or 6 substitutions relative to any amino acid sequence according to SEQ ID Nos: 211-247, 1831-1847. In some embodiments, the V_{L}-CDR3 comprises an amino acid sequence having at least 0, 1, 2, 3, 4, 5, or 6 substitutions relative to any amino acid sequence according to SEQ ID Nos: 248-296, 1848-1864.

[0196] In some embodiments, the antibody or binding fragment thereof comprises a combination of a V_{H}-CDR1, a V_{H}-CDR2, a V_{H}-CDR3, V_{L}-CDR1, a V_{L}-CDR2, and a V_{L}-CDR3, where one or more of these CDRs is defined by a consensus sequence. The consensus sequences provided herein have been derived from the alignments of CDRs depicted in FIG. 39A-B. However, it is envisioned that alternative alignments may be done (e.g., using global or local alignment, or with different algorithms, such as Hidden Markov Models, seeded guide trees, Needleman-Wunsch algorithm, or Smith-Waterman algorithm) and as such, alternative consensus sequences can be derived.

[0197] In some embodiments, the V_{H}-CDR1 is defined by the formula X₁X₂X₃X₄X₅X₆X₇X₈X₉X₁₀ (SEQ ID NO. 1915), where X₁ is E, G, or R; X₂ is F, N, or Y; X₃ is A, I, K, N, S, or T; X₄ is F, I, or L; X₅ is I, K, N, R, S, or T; X₆ is D, G, I, N, S, or T; X₇ is F, G, H, S, or Y; X₈ is no amino acid, A, D, G, I, M, N, T, V, W, or Y; X₉ is no amino acid, M, or Y; X₁₀ is no amino acid or G; In some embodiments, the V_{H}-CDR1 comprises a sequence having at least 80%, 81%, 82%, 83%, 84%, 85%, 86%, 87%, 88%, 89%, 90%, 91%, 92%, 93%, 94%, 95%, 96%, 97%, 98%, 99%, or 100% identity to this consensus sequence. In some embodiments, the V_{H}-CDR1 comprises a sequence having 0, 1, 2, 3, 4, 5, or 6 substitutions from this consensus sequence.

[0198] In some embodiments, the VH-CDR2 is defined by the formula X₁X₂X₃X₄X₅X₆X₇X₈X₉X₁₀ (SEQ ID NO. 1916), where X₁ is no amino acid, I, or L; X₂ is no amino acid or R; X₃ is no amino acid, F, I, L, or V; X₄ is A, D, F, H, K, L, N, S, W, or Y; X₅ is A, D, P, S, T, W, or Y; X₆ is D, E, G, H, K, N, S, V, or Y; X₇ is D, E, G, N, S, or T; X₈ is D, G, I, K, N, Q, R, S, V, or Y; X₉ is A, D, E, G, I, K, N, P, S, T, V, or Y; X₁₀ is no amino acid, I, P, S, or T. In some embodiments, the V_{H}-CDR2 comprises a sequence having at least 80%, 81%, 82%, 83%, 84%, 85%, 86%, 87%, 88%, 89%, 90%, 91%, 92%, 93%, 94%, 95%, 96%, 97%, 98%, 99%, or 100% identity to this consensus sequence. In some embodiments, the V_{H}-CDR2 comprises a sequence having 0, 1, 2, 3, 4, 5, or 6 substitutions from this consensus sequence.

[0199] In some embodiments, the V_{H}-CDR3 is defined by the formula X₁X₂X₃X₄X₅X₆X₇X₈X₉X₁₀X₁₁X₁₂X₁₃X₁₄X₁₅X₁₆X₁₇X₁₈X₁₉X₂₀X₂₁X₂₂X₂₃X₂₄X₂₅ (SEQ ID NO. 1917), where X₁ is no amino acid or A; X₂ is no amino acid, A, R, or Y; X₃ is no amino acid, A, F, H, K, L, R, S, or V; X₄ is no amino acid, A, D, K, N, R, S, or T; X₅ is no amino acid, A, D, G, H, I, L, N, P, R, S, T, V, or Y; X₆ is no amino acid, A, D, G, H, K, N, P, Q, R, S, or Y; X₇ is no amino acid, D, F, G, H, P, R, S, W, or Y; X₈ is no amino acid, A, D, E, G, I, R, or S; X₉ is no amino acid, A, C, D, E, F, G, I, N, R, S, T, V, or Y; X₁₀ is no amino acid, A, D, M, P, R, S, T, V, or Y; X₁₁ is no amino acid, A, D, E, F, L, T, V, or Y; X₁₂ is no amino acid, A, G, L, M, R, or T; X₁₃ is no amino acid, A, D, E, F, G, R, S, T, or V; X₁₄ is no amino acid, A, D, G, L, P, Q, R, S, T, V, or Y; X₁₅ is no amino acid, A, D, G, N, S, V, W, or Y; X₁₆ is no amino acid, A, D, E, F, L, P, T, V, W, or Y; X 17 is no amino acid, F, I, L, M, R, or Y; X₁₈ is no amino acid, A, D, G, N, or T; X₁₉ is no amino acid, F, N, S, T, V, or Y; X₂₀ is no amino acid or L; X₂₁ is no amino acid or A; X₂₂ is no amino acid or W; X₂₃ is no amino acid or F; X₂₄ is no amino acid or A; X₂₅ is no amino acid or Y. In some embodiments, the V_{H}-CDR3 comprises a sequence having at least 80%, 81%, 82%, 83%, 84%, 85%, 86%, 87%, 88%, 89%, 90%, 91%, 92%, 93%, 94%, 95%, 96%, 97%, 98%, 99%, or 100% identity to this consensus sequence. In some embodiments, the V_{H}-CDR3 comprises a sequence having 0, 1, 2, 3, 4, 5, or 6 substitutions from this consensus sequence.

[0200] In some embodiments, the VL-CDR1 is defined by the formula X₁X₂X₃X₄X₅X₆X₇X₈X₉X₁₀X₁₁X₁₂X₁₃X₁₄X₁₅X₁₆X₁₇ (SEQ ID NO. 1918), where X₁ is no amino acid or R; X₂ is no amino acid or S; X₃ is no amino acid, S, or T; X₄ is no amino acid, E, G, K, Q, or R; X₅ is no amino acid, A, D, G, I, N, or S; X₆ is no amino acid, I, L, or V; X₇ is no amino acid, F, L, S, or V; Xx is no amino acid, D, E, H, N, S, T, or Y; X₉ is no amino acid, D, E, I, K, N, R, S, T, or V; X₁₀ is no amino acid, D, H, N, R, S, or Y; X₁₁ is no amino acid, A, G, N, S, T, or V; X₁₂ is no amino acid, A, I, K, N, Q, T, V, or Y; X₁₃ is no amino acid, D, G, H, K, N, S, T, or Y; X₁₄ is no amino acid, C, F, I, N, S, T, V, or Y; X₁₅ is no amino acid, D, L, N, W, or Y; X₁₆ is no amino acid, N, or D; X₁₇ is no amino acid or D. In some embodiments, the V_{L}-CDR1 comprises a sequence having at least 80%, 81%, 82%, 83%, 84%, 85%, 86%, 87%, 88%, 89%, 90%, 91%, 92%, 93%, 94%, 95%, 96%, 97%, 98%, 99%, or 100% identity to this consensus sequence. In some embodiments, the V_{L}-CDR1 comprises a sequence having 0, 1, 2, 3, 4, 5, or 6 substitutions from this consensus sequence.

[0201] In some embodiments, the V_{L}-CDR2 is defined by the formula X₁X₂X₃X₄X₅X₆X₇X₈ (SEQ ID NO. 1919), where X₁ is no amino acid, K, L, N, Q, or R; X₂ is no amino acid, A, L, M, or V; X₃ is no amino acid, C, K, or S; X₄ is no amino acid or T; X₅ is no amino acid, A, E, F, G, H, K, Q, R, S, W, or Y; X₆ is no amino acid, A, G, or T; X₇ is no amino acid, I, K, N, S, or T; Xx is no amino acid, N, or S. In some embodiments, the V_{L}-CDR2 comprises a sequence having at least 80%, 81%, 82%, 83%, 84%, 85%, 86%, 87%, 88%, 89%, 90%, 91%, 92%, 93%, 94%, 95%, 96%, 97%, 98%, 99%, or 100% identity to this consensus sequence. In some embodiments, the V_{L}-CDR2 comprises a sequence having 0, 1, 2, 3, 4, 5, or 6 substitutions from this consensus sequence.

[0202] In some embodiments, the V_{L}-CDR3 is defined by the formula X₁X₂X₃X₄X₅X₆X₇X₈X₉X₁₀ (SEQ ID NO. 1920), where X₁ is no amino acid, A, E, F, H, L, M, Q, S, V, or W; X₂ is A, H, or Q; X₃ is D, F, G, H, L, M, N, Q, S, T, W, or Y; X₄ is no amino acid or W; X₅ is A, D, I, K, L, N, Q, R, S, T, V, or Y; X₆ is D, E, H, I, K, L, N, Q, S, or T; X₇ is D, F, K, L, N, P, S, T, V, W, or Y; X₈ is H, P, or S; X₉ is F, L, P, Q, R, T, W, or Y; X₁₀ is no amino acid, T, or V. In some embodiments, the V_{L}-CDR3 comprises a sequence having at least 80%, 81%, 82%, 83%, 84%, 85%, 86%, 87%, 88%, 89%, 90%, 91%, 92%, 93%, 94%, 95%, 96%, 97%, 98%, 99%, or 100% identity to this consensus sequence. In some embodiments, the V_{L}-CDR3 comprises a sequence having 0, 1, 2, 3, 4, 5, or 6 substitutions from this consensus sequence.

[0203] In some embodiments, the heavy chain variable region of the anti-Gal3 antibody or binding fragment thereof comprises a sequence having at least 80%, 81%, 82%, 83%, 84%, 85%, 86%, 87%, 88%, 89%, 90%, 91%, 92%, 93%, 94%, 95%, 96%, 97%, 98%, 99%, or 100% identity to the sequence selected from SEQ ID Nos: 297-373, 803, 806-820, 955-968, 1067-1109, 1415-1439, 1882-1898. In some embodiments, the light chain variable region of the antibody or binding fragment thereof comprises a sequence having at least 80%, 81%, 82%, 83%, 84%, 85%, 86%, 87%, 88%, 89%, 90%, 91%, 92%, 93%, 94%, 95%, 96%, 97%, 98%, 99%, or 100% identity to the sequence selected from SEQ ID Nos: 374-447, 821-835, 941-943, 969-982, 1110-1152, 1440-1464, 1899-1914, 1921. In some embodiments, the antibodies or binding fragments thereof are anti-Gal3 antibodies or binding fragments thereof.

[0204] In some embodiments, the heavy chain variable region of the anti-Gal3 antibody or binding fragment thereof comprises a sequence having at least 80%, 81%, 82%, 83%, 84%, 85%, 86%, 87%, 88%, 89%, 90%, 91%, 92%, 93%, 94%, 95%, 96%, 97%, 98%, 99%, or 100% similarity to the sequence selected from SEQ ID Nos: 297-373, 803, 806-820, 955-968, 1067-1109, 1415-1439, 1882-1898. In some embodiments, the light chain variable region of the antibody or binding fragment thereof comprises a sequence having at least 80%, 81%, 82%, 83%, 84%, 85%, 86%, 87%, 88%, 89%, 90%, 91%, 92%, 93%, 94%, 95%, 96%, 97%, 98%, 99%, or 100% similarity to the sequence selected from SEQ ID Nos: 374-447, 821-835, 941-943, 969-982, 1110-1152, 1440-1464, 1899-1914, 1921. In some embodiments, the antibodies or binding fragments thereof are anti-Gal3 antibodies or binding fragments thereof.

[0205] In some embodiments, the antibodies comprise one or more sequences having at least 80%, 81%, 82%, 83%, 84%, 85%, 86%, 87%, 88%, 89%, 90%, 91%, 92%, 93%, 94%, 95%, 96%, 97%, 98%, 99%, or 100% identity to a V_{L} sequence, a V_{H} sequence, a VL/VH pairing, and/or V_{L}-CDR1, V_{L}-CDR2, V_{L}-CDR3, V_{H}-CDR1, V_{H}-CDR2, V_{H}-CDR3 (including 1, 2, 3, 4, or 5 amino acid substitutions of any one or more of these CDRs) set from the heavy chain and light chain sequences as depicted in FIG. 32.

[0206] In some embodiments, the anti-Gal3 antibodies or binding fragments thereof comprises a heavy chain variable region comprising a V_{H}-CDR1, a V_{H}-CDR2, and a V_{H}-CDR3. In some embodiments, the anti-Gal3 antibodies or binding fragments thereof comprise a light chain variable region comprising a V_{L}-CDR1, a V_{L}-CDR2, and a V_{L}-CDR3. In some embodiments, the V_{H}-CDR1 comprises one of the amino acid sequences of SEQ ID Nos: 27-70, 1763-1779, the V_{H}-CDR2 comprises one of the amino acid sequences of SEQ ID Nos: 71-111, 801, 951, 952, 1780-1796, the V_{H}-CDR3 comprises one of the amino acid sequences of SEQ ID NO: 112-169, 802, 953, 954, 1797-1813, the V_{L}-CDR1 comprises one of the amino acid sequences of SEQ ID Nos: 170-220, 1814-1830, the V_{L}-CDR2 comprises one of the amino acid sequences of SEQ ID Nos: 211-247, 1831-1847, the V_{L}-CDR3 comprises one of the amino acid sequences of SEQ ID Nos: 248-296, 1848-1864, the heavy chain variable region has a sequence having at least 80%, 81%, 82%, 83%, 84%, 85%, 86%, 87%, 88%, 89%, 90%, 91%, 92%, 93%, 94%, 95%, 96%, 97%, 98%, 99%, or 100% identity to one of the amino acid sequences of SEQ ID Nos: 297-373, 803, 806-820, 955-968, 1067-1109, 1415-1439, 1882-1898, and the light chain variable region has a sequence having at least 80%, 81%, 82%, 83%, 84%, 85%, 86%, 87%, 88%, 89%, 90%, 91%, 92%, 93%, 94%, 95%, 96%, 97%, 98%, 99%, or 100% identity to one of the amino acid sequences of SEQ ID Nos: 374-447, 821-835, 941-943, 969-982, 1110-1152, 1440-1464, 1899-1914, 1921.

[0207] In some embodiments, the anti-Gal3 antibody or binding fragment thereof comprises a heavy chain, wherein the heavy chain comprises a sequence having at least 80%, 81%, 82%, 83%, 84%, 85%, 86%, 87%, 88%, 89%, 90%, 91%, 92%, 93%, 94%, 95%, 96%, 97%, 98%, 99%, or 100% identity to the sequence selected from SEQ ID Nos: 448-494, 804, 836-850, 983-996, 1153-1195, 1465-1489, 1695-1711. In some embodiments, the heavy chain further comprises a signal peptide having at least 90% identity to SEQ ID NO: 1922. In some embodiments, the heavy chain further comprises a signal peptide that is SEQ ID NO: 1922. In some embodiments, the antibody or binding fragment thereof comprises a light chain, wherein the light chain comprises a sequence having at least 80%, 81%, 82%, 83%, 84%, 85%, 86%, 87%, 88%, 89%, 90%, 91%, 92%, 93%, 94%, 95%, 96%, 97%, 98%, or 99% identity to the sequence selected from SEQ ID Nos: 495-538, 805, 851-865, 997-1010, 1196-1238, 1490-1514, 1746-1762. In some embodiments, the light chain further comprises a signal peptide. In some embodiments, the light chain further comprises a signal peptide having at least 90% identity to SEQ ID NO: 1923 or SEQ ID NO: 1924. In some embodiments, the light chain further comprises a signal peptide that is SEQ ID NO: 1923. In some embodiments, the light chain further comprises a signal peptide that is SEQ ID NO: 1924.

[0208] In some embodiments, the anti-Gal3 antibody or binding fragment thereof comprises a heavy chain, wherein the heavy chain is encoded by a nucleic acid sequence having at least 80%, 81%, 82%, 83%, 84%, 85%, 86%, 87%, 88%, 89%, 90%, 91%, 92%, 93%, 94%, 95%, 96%, 97%, 98%, 99%, or 100% identity to a sequence selected from SEQ ID NOs: 703-749, 799, 896-910, 1039-1052, 1325-1367, 1413, and 1565-1589. In some embodiments, the heavy chain further comprises a signal peptide encoded by a nucleic acid sequence having at least 90% identity to SEQ ID NO: 1925. In some embodiments, the antibody or binding fragment thereof comprises a light chain, wherein the light chain is encoded by a nucleic acid sequence having at least 80%, 81%, 82%, 83%, 84%, 85%, 86%, 87%, 88%, 89%, 90%, 91%, 92%, 93%, 94%, 95%, 96%, 97%, 98%, or 99% identity to the sequence selected from SEQ ID NOs: 750-796, 911-925, 1053-1066, 1368-1410, 1414, and 1590-1614. In some embodiments, the light chain further comprises a signal peptide. In some embodiments, the light chain further comprises a signal peptide encoded by a nucleic acid sequence having at least 90% identity to SEQ ID NO: 1926 or SEQ ID NO: 1927. In some embodiments, the light chain further comprises a signal peptide encoded by a nucleic acid sequence that is SEQ ID NO: 1926. In some embodiments, the light chain further comprises a signal peptide that is SEQ ID NO: 1927.

[0209] In some embodiments, the antibodies or binding fragments thereof are anti-Gal3 antibodies or binding fragments thereof.

[0210] In some embodiments, the anti-Gal3 antibody or binding fragment thereof comprises a heavy chain, wherein the heavy chain comprises a sequence having at least 80%, 81%, 82%, 83%, 84%, 85%, 86%, 87%, 88%, 89%, 90%, 91%, 92%, 93%, 94%, 95%, 96%, 97%, 98%, 99%, or 100% similarity to the sequence selected from SEQ ID NOs: 448-494, 804, 836-850, 983-996, 1153-1195, 1465-1489, 1695-1711. In some embodiments, the heavy chain further comprises a signal peptide. In some embodiments, the heavy chain further comprises a signal peptide having at least 90% identity to SEQ ID NO: 1922. In some embodiments, the antibody or binding fragment thereof comprises a light chain, wherein the light chain comprises a sequence having at least 80%, 81%, 82%, 83%, 84%, 85%, 86%, 87%, 88%, 89%, 90%, 91%, 92%, 93%, 94%, 95%, 96%, 97%, 98%, or 99% similarity to the sequence selected from SEQ ID NOs: 495-538, 805, 851-865, 997-1010, 1196-1238, 1490-1514, 1746-1762. In some embodiments, the light chain further comprises a signal peptide. In some embodiments, the light chain further comprises a signal peptide having at least 90% identity to SEQ ID NO: 1923 or SEQ ID NO: 1924. In some embodiments, the light chain further comprises a signal peptide that is SEQ ID NO: 1923. In some embodiments, the light chain further comprises a signal peptide that is SEQ ID NO: 1924. In some embodiments, the antibodies or binding fragments thereof are anti-Gal3 antibodies or binding fragments thereof.

[0211] In some embodiments, the anti-Gal3 antibodies or binding fragments thereof comprise a heavy chain variable region and a light chain variable region. In some embodiments, the heavy chain variable region is paired with an IgG4 heavy chain constant domain or an IgG2 heavy chain constant domain. In some embodiments, the IgG4 heavy chain constant domain or IgG2 heavy chain constant domain are human or murine. In some embodiments, the IgG4 heavy chain constant domain comprises a sequence having at least 80%, 81%, 82%, 83%, 84%, 85%, 86%, 87%, 88%, 89%, 90%, 91%, 92%, 93%, 94%, 95%, 96%, 97%, 98%, 99%, or 100% identity to SEQ ID NO: 931. In some embodiments, the IgG4 heavy chain constant domain is an S228P mutant. In some embodiments, the IgG2 heavy chain constant domain comprises a sequence having at least 80%, 81%, 82%, 83%, 84%, 85%, 86%, 87%, 88%, 89%, 90%, 91%, 92%, 93%, 94%, 95%, 96%, 97%, 98%, 99%, or 100% identity to SEQ ID NO: 933 or SEQ ID NO: 934. In some embodiments, the IgG2 heavy chain constant domain is a LALAPG or a LALA mutant. In some embodiments, the light chain variable region is paired with an IgG4 kappa chain constant domain. In some embodiments, the IgG4 kappa chain constant domain comprises a sequence having at least 80%, 81%, 82%, 83%, 84%, 85%, 86%, 87%, 88%, 89%, 90%, 91%, 92%, 93%, 94%, 95%, 96%, 97%, 98%, 99%, or 100% identity to SEQ ID NO: 932. Exemplary heavy chain and light chain constant domains can be found in FIG. 34. In some embodiments, the light chain variable region and/or heavy chain variable region may be selected from those depicted in FIGS. 28 and 29 and/or the combinations of light chain variable region and heavy chain variable region as depicted in FIG. 34. In some embodiments, the light chain variable region and/or heavy chain variable regions comprise one or more CDRs depicted in FIGS. 26A-C, 27A-C and/or the combinations of CDRs depicted in FIG. 30.

[0212] In some embodiments, the antibody or binding fragment thereof is selected from the group consisting of at least one of: TB001, TB006, 12G5.D7, 13A12.2E5, 14H10.2C9, 15F10.2D6, 19B5.2E6, 20D11.2C6, 20H5.A3, 23H9.2E4, 2D10.2B2, 3B11.2G2, 7D8.2D8, mIMT001, 4A11.2B5, 4A11.H1L1, 4A11.H4L2, 4G2.2G6, 6B3.2D3, 6H6.2D6, 9H2.2H10, 13G4.2F8, 13H12.2F8, 15G7.2A7, 19D9.2E5, 23B10.2B12, 24D12.2H9, F846C.1B2, F846C.1F5, F846C.1H12, F846C.1H5, F846C.2H3, F846TC.14A2, F846TC.14E4, F846TC.16B5, F846TC.7F10, F847C.10B9, F847C.11B1, F847C.12F12, F847C.26F5, F847C.4B10, F849C.8D10, F849C.8H3, 846.2B11, 846.4D5, 846T.1H2, 847.14H4, 846.2D4, 846.2F11, 846T.10B1, 846T.2E3, 846T.4C9, 846T.4E11, 846T.4F5, 846T.8D1, 847.10C9, 847.11D6, 847.15D12, 847.15F9, 847.15H11, 847.20H7, 847.21B11, 847.27B9, 847.28D1, 847.2B8, 847.3B3, 849.1D2, 849.2D7, 849.2F12, 849.4B2, 849.4F12, 849.4F2, 849.5C2, 849.8D12, F847C.21H6, 849.5H1, 847.23F11, 847.16D10, 847.13E2-mH0mL1, 847.13E2-mH0mL2, 847.12C4, 847.4D3, 2D10-VH0-VL0, 2D10-hVH4-HVL1, 2D10-hVH4-HVL2, 2D10-hVH4-HVL3, 2D10-hVH4-HVL4, 2D10-hVH3-HVL1, 2D10-hVH3-HVL2, 2D10-hVH3-HVL3, 2D10-hVH3-HVL4, 20H5.A3-VH3VL1, 20H5.A3-VH3VL3, 20H5.A3-VH4VL1, 20H5.A3-VH5VL1, 20H5.A3-VH5VL3, 20H5.A3-VH6VL1, 20H5.A3-VH6VL3, or binding fragment thereof. In some embodiments, the anti-Gal3 antibody or binding fragment thereof is selected from the group consisting of at least one of: 2D10-VH0-VL0, 2D10-hVH4-HVL1, 2D10-hVH4-HVL2, 2D10-hVH4-HVL3, 2D10-hVH4-HVL4, 2D10-hVH3-HVL1, 2D10-hVH3-HVL2, 2D10-hVH3-HVL3, 2D10-hVH3-HVL4, or binding fragment thereof. In some embodiments, the anti-Gal3 antibody or binding fragment thereof is selected from the group consisting of at least one of: 21H6-H0L0, 21H6-H1L1, 21H6-H1L2, 21H6-H1L3, 21H6-H1L4, 21H6-H2L1, 21H6-H2L2, 21H6-H2L3, 21H6-H2L4, 21H6-H3L1, 21H6-H3L2, 21H6-H3L3, 21H6-H3L4, 21H6-H4L1, 21H6-H4L2, 21H6-H4L3, 21H6-H4L4, 21H6-H5L1, 21H6-H5L2, 21H6-H5L3, 21H6-H5L4, 21H6-H6L1, 21H6-H6L2, 21H6-H6L3, 21H6-H6L4, or binding fragment thereof. In some embodiments, the antibody or binding fragment thereof further comprises a signal peptide.

[0213] In some embodiments, the antibody or binding fragment thereof comprises a sequence (e.g. CDR, VL, VH, LC, HC) having at least 80%, 81%, 82%, 83%, 84%, 85%, 86%, 87%, 88%, 89%, 90%, 91%, 92%, 93%, 94%, 95%, 96%, 97%, 98%, 99%, or 100% sequence identity to a sequence of TB001, TB006, 12G5.D7, 13A12.2E5, 14H10.2C9, 15F10.2D6, 19B5.2E6, 20D11.2C6, 20H5.A3, 23H9.2E4, 2D10.2B2, 3B11.2G2, 7D8.2D8, mIMT001, 4A11.2B5, 4A11.H1L1, 4A11.H4L2, 4G2.2G6, 6B3.2D3, 6H6.2D6, 9H2.2H10, 13G4.2F8, 13H12.2F8, 15G7.2A7, 19D9.2E5, 23B10.2B12, 24D12.2H9, F846C.1B2, F846C.1F5, F846C.1H12, F846C.1H5, F846C.2H3, F846TC.14A2, F846TC.14E4, F846TC.16B5, F846TC.7F10, F847C.10B9, F847C.11B1, F847C.12F12, F847C.26F5, F847C.4B10, F849C.8D10, F849C.8H3, 846.2B11, 846.4D5, 846T.1H2, 847.14H4, 846.2D4, 846.2F11, 846T.10B1, 846T.2E3, 846T.4C9, 846T.4E11, 846T.4F5, 846T.8D1, 847.10C9, 847.11D6, 847.15D12, 847.15F9, 847.15H11, 847.20H7, 847.21B11, 847.27B9, 847.28D1, 847.2B8, 847.3B3, 849.1D2, 849.2D7, 849.2F12, 849.4B2, 849.4F12, 849.4F2, 849.5C2, 849.8D12, F847C.21H6, 849.5H1, 847.23F11, 847.16D10, 847.13E2-mH0mL1, 847.13E2-mH0mL2, 847.12C4, 847.4D3, 2D10-VH0-VL0, 2D10-hVH4-HVL1, 2D10-hVH4-HVL2, 2D10-hVH4-HVL3, 2D10-hVH4-HVL4, 2D10-hVH3-HVL1, 2D10-hVH3-HVL2, 2D10-hVH3-HVL3, 2D10-hVH3-HVL4, 20H5.A3-VH3VL1, 20H5.A3-VH3VL3, 20H5.A3-VH4VL1, 20H5.A3-VH5VL1, 20H5.A3-VH5VL3, 20H5.A3-VH6VL1, 20H5.A3-VH6VL3, or binding fragment thereof. In some embodiments, the anti-Gal3 antibody or binding fragment thereof is selected from the group consisting of at least one of: 2D10-VH0-VL0, 2D10-hVH4-HVL1, 2D10-hVH4-HVL2, 2D10-hVH4-HVL3, 2D10-hVH4-HVL4, 2D10-hVH3-HVL1, 2D10-hVH3-HVL2, 2D10-hVH3-HVL3, 2D10-hVH3-HVL4, or binding fragment thereof. In some embodiments, the anti-Gal3 antibody or binding fragment thereof is selected from the group consisting of at least one of: 21H6-H0L0, 21H6-H1L1, 21H6-H1L2, 21H6-H1L3, 21H6-H1L4, 21H6-H2L1, 21H6-H2L2, 21H6-H2L3, 21H6-H2L4, 21H6-H3L1, 21H6-H3L2, 21H6-H3L3, 21H6-H3L4, 21H6-H4L1, 21H6-H4L2, 21H6-H4L3, 21H6-H4L4, 21H6-H5L1, 21H6-H5L2, 21H6-H5L3, 21H6-H5L4, 21H6-H6L1, 21H6-H6L2, 21H6-H6L3, 21H6-H6L4, or binding fragment thereof. In some embodiments, the antibody or binding fragment thereof further comprises a signal peptide.

[0214] In some embodiments, the anti-Gal3 antibody or binding fragment thereof binds to specific epitopes within a Gal3 protein. In some embodiments, the anti-Gal3 antibody or binding fragment thereof binds to a specific epitope within a Gal3 protein having an amino acid sequence according to SEQ ID NO: 1-2, provided in FIG. 24.

[0215] In some embodiments, the anti-Gal3 antibody or binding fragment thereof may bind to at least 1, 2, 3, 4, 5, 6, 7, 8, 9, 10, 11, 12, 13, 14, 15, 16, 17, 18, 19, or 20 amino acid residues within a peptide illustrated in FIG. 25 (SEQ ID NOs: 3-26).

[0216] In some embodiments, the anti-Gal3 antibody or binding fragment thereof may bind to at least 1, 2, 3, 4, 5, 6, 7, 8, 9, 10, 11, 12, 13, 14, 15, 16, 17, 18, 19, or 20 amino acid residues within amino acid residues 1-20 of SEQ ID NO: 1-2. In some embodiments, the anti-Gal3 antibody or binding fragment thereof may bind to at least 1, 2, 3, 4, 5, 6, 7, 8, 9, 10, 11, 12, 13, 14, 15, 16, 17, 18, 19, or 20 amino acid residues within amino acid residues 31-50 of SEQ ID NO: 1-2. In some embodiments, the anti-Gal3 antibody or binding fragment thereof may bind to at least 1, 2, 3, 4, 5, 6, 7, 8, 9, 10, 11, 12, 13, 14, 15, 16, 17, 18, 19, or 20 amino acid residues within amino acid residues 51-70 of SEQ ID NO: 1-2. In some embodiments, the anti-Gal3 antibody or binding fragment thereof may bind to at least 1, 2, 3, 4, 5, 6, 7, 8, 9, 10, 11, 12, 13, 14, 15, 16, 17, 18, 19, or 20 amino acid residues within amino acid residues 61-80 of SEQ ID NO: 1-2.

[0217] In some embodiments, the anti-Gal3 antibody or binding fragment thereof may bind to at least 1, 2, 3, 4, 5, 6, 7, 8, 9, 10, 11, 12, 13, 14, 15, 16, 17, 18, 19, or 20 amino acid residues within Peptide 1 (SEQ ID NO: 3), Peptide 4 (SEQ ID NO: 6), Peptide 6 (SEQ ID NO: 8), or Peptide 7 (SEQ ID NO: 9). In some embodiments, the anti-Gal3 antibody or binding fragment thereof may bind to at least 1, 2, 3, 4, 5, 6, 7, 8, 9, 10, 11, 12, 13, 14, 15, 16, 17, 18, 19, or 20 amino acid residues within Peptide 1 (SEQ ID NO: 3). In some embodiments, the anti-Gal3 antibody or binding fragment thereof may bind to at least 1, 2, 3, 4, 5, 6, 7, 8, 9, 10, 11, 12, 13, 14, 15, 16, 17, 18, 19, or 20 amino acid residues within Peptide 4 (SEQ ID NO: 6). In some embodiments, the anti-Gal3 antibody or binding fragment thereof may bind to at least 1, 2, 3, 4, 5, 6, 7, 8, 9, 10, 11, 12, 13, 14, 15, 16, 17, 18, 19, or 20 amino acid residues within Peptide 6 (SEQ ID NO: 8). In some embodiments, the anti-Gal3 antibody or binding fragment thereof may bind to at least 1, 2, 3, 4, 5, 6, 7, 8, 9, 10, 11, 12, 13, 14, 15, 16, 17, 18, 19, or 20 amino acid residues within Peptide 7 (SEQ ID NO: 9). In some embodiments, the anti-Gal3 antibody or binding fragment thereof binds to an epitope present within a region of Gal3 defined by Peptide 1 (SEQ ID NO: 3). In some embodiments, the anti-Gal3 antibody or binding fragment thereof binds to an epitope present within a region of Gal3 defined by Peptide 4 (SEQ ID NO: 6). In some embodiments, the anti-Gal3 antibody or binding fragment thereof binds to an epitope present within a region of Gal3 defined by Peptide 6 (SEQ ID NO: 8). In some embodiments, the anti-Gal3 antibody or binding fragment thereof binds to an epitope present within a region of Gal3 defined by Peptide 7 (SEQ ID NO: 9). In some embodiments, the antibody is one that binds to 1, 2, or all 3 of peptides 1, 6, and/or 7.

[0218] In some embodiments, the anti-Gal3 antibody or binding fragment thereof further comprises one or more signal peptides. In some embodiments, the anti-Gal3 antibody or binding fragment thereof heavy chain further comprises a signal peptide. In some embodiments, the heavy chain further comprises a signal peptide having at least 80%, 81%, 82%, 83%, 84%, 85%, 86%, 87%, 88%, 89%, 90%, 91%, 92%, 93%, 94%, 95%, 96%, 97%, 98%, 99%, or 100% identity to SEQ ID NO: 1922. In some embodiments, the heavy chain further comprises a signal peptide that is SEQ ID NO: 1922. In some embodiments, the heavy chain further comprises a signal peptide encoded by a nucleic acid sequence having at least 80%, 81%, 82%, 83%, 84%, 85%, 86%, 87%, 88%, 89%, 90%, 91%, 92%, 93%, 94%, 95%, 96%, 97%, 98%, 99%, or 100% identity to SEQ ID NO: 1925. In some embodiments, the heavy chain further comprises a signal peptide encoded by a nucleic acid sequence that is SEQ ID NO: 1925. In some embodiments, the anti-Gal3 antibody or binding fragment thereof light chain further comprises a signal peptide. In some embodiments, the light chain further comprises a signal peptide having at least 80%, 81%, 82%, 83%, 84%, 85%, 86%, 87%, 88%, 89%, 90%, 91%, 92%, 93%, 94%, 95%, 96%, 97%, 98%, 99%, or 100% identity to SEQ ID NO: 1923 or SEQ ID NO: 1924. In some embodiments, the light chain further comprises a signal peptide that is SEQ ID NO: 1923. In some embodiments, the light chain further comprises a signal peptide that is SEQ ID NO: 1924. In some embodiments, the light chain further comprises a signal peptide encoded by a nucleic acid sequence having at least 80%, 81%, 82%, 83%, 84%, 85%, 86%, 87%, 88%, 89%, 90%, 91%, 92%, 93%, 94%, 95%, 96%, 97%, 98%, 99%, or 100% identity to SEQ ID NO: 1926 or SEQ ID NO: 1927. In some embodiments, the light chain further comprises a signal peptide encoded by a nucleic acid sequence that is SEQ ID NO: 1926. In some embodiments, the light chain further comprises a signal peptide encoded by a nucleic acid sequence that is SEQ ID NO: 1927.

[0219] In some embodiments, any one or more of the constructs shown in any one or more of FIG. 24-39 can be used in any one or more of the embodiments provided herein (e.g., methods of treatment or uses in the preparation of a medicament for a therapy, etc.).

### Kit/Article of Manufacture

[0220] Disclosed herein, in certain embodiments, are kits and articles of manufacture for use with one or more of the compositions and methods described herein. Such kits include a carrier, package, or container that is compartmentalized to receive one or more containers such as vials, tubes, and the like, each of the container(s) comprising one of the separate elements to be used in a method described herein. Suitable containers include, for example, bottles, vials, syringes, and test tubes. In one embodiment, the containers are formed from a variety of materials such as glass or plastic.

[0221] The articles of manufacture provided herein contain packaging materials. Examples of pharmaceutical packaging materials include, but are not limited to, blister packs, bottles, tubes, bags, containers, bottles, and any packaging material suitable for a selected formulation and intended mode of administration and treatment.

[0222] For example, the container(s) include an anti-Gal3 antibody as disclosed herein, host cells for producing one or more antibodies described herein, and/or vectors comprising nucleic acid molecules that encode the antibodies described herein. Such kits optionally include an identifying description or label or instructions relating to its use in the methods described herein.

[0223] A kit typically includes labels listing contents and/or instructions for use, and package inserts with instructions for use. A set of instructions will also typically be included.

[0224] In one embodiment, a label is on or associated with the container. In one embodiment, a label is on a container when letters, numbers or other characters forming the label are attached, molded, or etched into the container itself; a label is associated with a container when it is present within a receptacle or carrier that also holds the container, e.g., as a package insert. In one embodiment, a label is used to indicate that the contents are to be used for a specific therapeutic application. The label also indicates directions for use of the contents, such as in the methods described herein.

[0225] In certain embodiments, the pharmaceutical compositions are presented in a pack or dispenser device which contains one or more unit dosage forms containing a compound provided herein. The pack, for example, contains metal or plastic foil, such as a blister pack. In one embodiment, the pack or dispenser device is accompanied by instructions for administration. In one embodiment, the pack or dispenser is also accompanied with a notice associated with the container in form prescribed by a governmental agency regulating the manufacture, use, or sale of pharmaceuticals, which notice is reflective of approval by the agency of the form of the drug for human or veterinary administration. Such notice, for example, is the labeling approved by the U.S. Food and Drug Administration for prescription drugs, or the approved product insert. In one embodiment, compositions containing a compound provided herein formulated in a compatible pharmaceutical carrier are also prepared, placed in an appropriate container, and labeled for treatment of an indicated condition.

### Numbered Arrangements

[0226] Some embodiments provided herein are described by way of the following provided numbered arrangements and also provided as possible combinations or overlapping embodiments:

[0227] 1. A method of treating microglia mediated inflammation in a subject in need thereof, the method comprising:
[0228] identifying a subject as having or at risk of having microglia mediated inflammation, and
[0229] administering a therapeutically effective amount of an anti-Gal3 antibody to the subject, wherein
[0230] administration of the antibody to the subject alleviates one or more symptoms of microglia mediated inflammation.

[0231] 2. A method of treating one or more diseases associated with microglia mediated inflammation in a subject in need thereof, the method comprising:
[0232] identifying a subject as having or at risk of having one or more diseases associated with microglia mediated inflammation, and
[0233] administering a therapeutically effective amount of an anti-Gal3 antibody to the administration of the antibody to the subject's eye alleviates one or more symptoms of a disease microglia mediated inflammation.

[0234] 3. A method of treating an ocular surface disease in a subject in need thereof, the method comprising:
[0235] identifying a subject as having or at risk of having an ocular surface disease, and
[0236] administering a therapeutically effective amount of an anti-Gal3 antibody to the subject, wherein
[0237] administration of the antibody to the subject alleviates one or more symptoms of ocular surface disease.

[0238] 4. A method of treating macular degeneration in a subject in need thereof, the method comprising:
[0239] identifying a subject as having or at risk of having macular degeneration, and
[0240] administering a therapeutically effective amount of an anti-Gal3 antibody to the subject, wherein
[0241] administration of the antibody to the subject alleviates one or more symptoms of macular degeneration.

[0242] 5. A method of treating dry eye disease in a subject in need thereof, the method comprising:
[0243] identifying a subject as having or at risk of having dry eye disease, and
[0244] administering a therapeutically effective amount of an anti-Gal3 antibody to the subject, wherein
[0245] administration of the antibody to the subject alleviates one or more symptoms of dry eye disease.

[0246] 6. A method of treating age-related vascular dysfunction in a subject in need thereof, the method comprising:
[0247] identifying a subject as having or at risk of having age-related vascular dysfunction, and
[0248] administering a therapeutically effective amount of an anti-Gal3 antibody to the
[0249] administration of the antibody to the subject alleviates one or more symptoms of age-related vascular dysfunction.

[0250] 7. A method of increasing tear formation in a subject in need thereof, the method comprising:
[0251] identifying a subject as likely to benefit from increased tear production,
[0252] administering a therapeutically effective amount of an anti-Gal3 antibody to the subject, wherein
[0253] administration of the anti-Gal3 antibody to the subject increases tear production in the subject as compared to tear production in the subject prior to administration of the antibody.

[0254] 8. A method of decreasing corneal sensitivity in a subject, the method comprising:
[0255] administering a therapeutically effective amount of an anti-Gal3 antibody to the subject, wherein
[0256] administration of the anti-Gal3 antibody to the subject's eye decreases corneal sensitivity in the subject as corneal sensitivity in the subject prior to administration of the antibody.

[0257] 9. A method of treating cataracts in a subject in need thereof, the method comprising:
[0258] identifying a subject as having or at risk of having cataracts, and
[0259] administering a therapeutically effective amount of an anti-Gal3 antibody to the subject, wherein
[0260] administration of the antibody to the subject reduces the severity of the subject's cataracts as compared to the severity of cataracts in the subjects prior to administration of the anti-Gal3 antibody.

[0261] 10. A method of preventing or reducing cataract formation in a subject in need thereof, the method comprising:
[0262] identifying a subject as having or at risk of having cataracts, and
[0263] administering a therapeutically effective amount of an anti-Gal3 antibody to the
[0264] administration of the antibody to the subject reduces or prevents cataract formation in the subject acts as compared to formation of cataracts in the subjects prior to administration of the anti-Gal3 antibody.

[0265] 11. A method of treating diabetic retinopathy in a subject in need thereof, the method comprising:
[0266] identifying a subject as having or at risk of having diabetic retinopathy, and
[0267] administering a therapeutically effective amount of an anti-Gal3 antibody to the subject, wherein
[0268] administration of the antibody to the subject alleviates one or more symptoms of diabetic retinopathy.

[0269] 12. A method of treating retinal drusen in a subject in need thereof, the method comprising:
[0270] identifying a subject as having or at risk of having retinal drusen, and
[0271] administering a therapeutically effective amount of an anti-Gal3 antibody to the subject, wherein
[0272] administration of the antibody to the subject reduces retinal drusen in the subject as compared to retinal drusen in the subject prior to administration of the anti-Gal3 antibody.

[0273] 13. The method of any one of the preceding arrangements, wherein the anti-Gal3 antibody is administered intraperitoneally.

[0274] 14. The method of any one of the preceding arrangements, wherein the anti-Gal3 antibody is administered topically.

[0275] 15. The method of any one of the preceding arrangements, wherein the one or more symptoms comprise dryness of the eye, foreign body sensation, burning sensation, itching, photophobia, eye redness, blurred vision, fluctuating vision, visual fatigue, or any combination thereof.

[0276] 16. The method of any one of the preceding arrangements, wherein the ocular surface disease comprises vascular dysfunction, angiogenesis, inflammation, and oxidative stress.

[0277] 17. The method of any one of the preceding arrangements, wherein the corneal sensitivity of the subject is decreased by up to about 100% as compared to corneal sensitivity in the subject prior to administration of the anti-Gal3 antibody.

[0278] 18. The method of any one of the preceding arrangements, wherein the corneal sensitivity of the subject is decreased by up to about 0.2 g as compared to corneal sensitivity in the subject prior to administration of the anti-Gal3 antibody.

[0279] 19. The method of any one of the preceding arrangements, wherein tear production is increased by up to about 10 mm/60 s as compared to tear production in the subject prior to administration of the anti-Gal3 antibody.

[0280] 20. The method of any one of the preceding arrangements, wherein tear production is increased by up to about 250% as compared to tear production in the subject prior to administration of the anti-Gal3 antibody.

[0281] 21. The method of any one of the preceding arrangements, wherein the anti-Gal3 antibody is administered, daily, twice daily, weekly, bi-weekly, and/or monthly.

[0282] 22. The method of any one of the preceding arrangements, wherein the anti-Gal3 antibody is administered for up to about 1, 2, 3, 4, 5, 6, 7, 8, 9, 10, 11, or 12 weeks, or for an amount of time that is in a range defined by any two of the preceding values.

[0283] 23. The method of any one of the preceding arrangements, wherein the anti-Gal3 antibody is administered on an ongoing basis.

[0284] 24. The method of any one of the preceding arrangements, wherein the anti-Gal3 antibody is topically administered to the subject's eye twice daily.

[0285] 25. The method of any one of the preceding arrangements, wherein the anti-Gal3 antibody is topically administered to the subject's eye twice daily for 14 days.

[0286] 26. The method of any one of the preceding arrangements, wherein 10 mg/kg of anti-Gal3 antibody is topically administered to the subject's eye.

[0287] 27. The method of any one of the preceding arrangements, wherein 10 mg/kg of anti-Gal3 antibody is topically administered to the subject's eye twice daily.

[0288] 28. The method of any one of the preceding arrangements, wherein 10 mg/kg of anti-Gal3 antibody is topically administered to the subject's eye twice daily for 14 days.

[0289] 29. The method of any one of the preceding arrangements, wherein the anti-Gal3 antibody is TB001 or a binding fragment thereof.

[0290] 30. The method of any one of the preceding arrangements, wherein the anti-Gal3 antibody is selected from the group consisting of at least one of: TB001, TB006, 12G5.D7, 13A12.2E5, 14H10.2C9, 15F10.2D6, 19B5.2E6, 20D11.2C6, 20H5.A3, 23H9.2E4, 2D10.2B2, 3B11.2G2, 7D8.2D8, mIMT001, 4A11.2B5, 4A11.H1L1, 4A11.H4L2, 4G2.2G6, 6B3.2D3, 6H6.2D6, 9H2.2H10, 13G4.2F8, 13H12.2F8, 15G7.2A7, 19D9.2E5, 23B10.2B12, 24D12.2H9, F846C.1B2, F846C.1F5, F846C.1H12, F846C.1H5, F846C.2H3, F846TC.14A2, F846TC.14E4, F846TC.16B5, F846TC.7F10, F847C.10B9, F847C.11B1, F847C.12F12, F847C.26F5, F847C.4B10, F849C.8D10, F849C.8H3, 846.2B11, 846.4D5, 846T.1H2, 847.14H4, 846.2D4, 846.2F11, 846T.10B1, 846T.2E3, 846T.4C9, 846T.4E11, 846T.4F5, 846T.8D1, 847.10C9, 847.11D6, 847.15D12, 847.15F9, 847.15H11, 847.20H7, 847.21B11, 847.27B9, 847.28D1, 847.2B8, 847.3B3, 849.1D2, 849.2D7, 849.2F12, 849.4B2, 849.4F12, 849.4F2, 849.5C2, 849.8D12, F847C.21H6, 849.5H1, 847.23F11, 847.16D10, 847.13E2-mH0mL1, 847.13E2-mH0mL2, 847.12C4, 847.4D3, 2D10-VH0-VL0, 2D10-hVH4-HVL1, 2D10-hVH4-HVL2, 2D10-hVH4-HVL3, 2D10-hVH4-HVL4, 2D10-hVH3-HVL1, 2D10-hVH3-HVL2, 2D10-hVH3-HVL3, 2D10-hVH3-HVL4, 20H5.A3-VH3VL1, 20H5.A3-VH3VL3, 20H5.A3-VH4VL1, 20H5.A3-VH5VL1, 20H5.A3-VH5VL3, 20H5.A3-VH6VL1, 20H5.A3-VH6VL3, 2D10-VH0-VL0, 2D10-hVH4-HVL1, 2D10-hVH4-HVL2, 2D10-hVH4-HVL3, 2D10-hVH4-HVL4, 2D10-hVH3-HVL1, 2D10-hVH3-HVL2, 2D10-hVH3-HVL3, 2D10-hVH3-HVL4, 21H6-H0L0, 21H6-H1L1, 21H6-H1L2, 21H6-H1L3, 21H6-H1L4, 21H6-H2L1, 21H6-H2L2, 21H6-H2L3, 21H6-H2L4, 21H6-H3L1, 21H6-H3L2, 21H6-H3L3, 21H6-H3L4, 21H6-H4L1, 21H6-H4L2, 21H6-H4L3, 21H6-H4L4, 21H6-H5L1, 21H6-H5L2, 21H6-H5L3, 21H6-H5L4, 21H6-H6L1, 21H6-H6L2, 21H6-H6L3, 21H6-H6L4, or binding fragment thereof.

[0291] 31. The method of any one of the preceding arrangements, wherein the antibody comprises (1) a heavy chain variable region comprising a V_{H}-CDR1, a V_{H}-CDR2, and a V_{H}-CDR3; and (2) a light chain variable region comprising a V_{L}-CDR1, a V_{L}-CDR2, and a V_{L}-CDR3, wherein
[0292] the antibody comprises at least 1 V_{L}-CDR having at least 90% identity to any one of the amino acid sequences of SEQ ID NOs: 170-296, 1814-1864.

[0293] 32. The method of any one of the preceding arrangements, wherein the antibody comprises (1) a heavy chain variable region comprising a V_{H}-CDR1, a V_{H}-CDR2, and a V_{H}-CDR3; and (2) a light chain variable region comprising a V_{L}-CDR1, a V_{L}-CDR2, and a V_{L}-CDR3, wherein
[0294] the antibody comprises at least 3 V_{L}-CDR having at least 90% identity to any one of the amino acid sequences of SEQ ID Nos: 170-296, 1814-1864.

[0295] 33. The method of any one of the preceding arrangements, wherein the antibody comprises (1) a heavy chain variable region comprising a V_{H}-CDR1, a V_{H}-CDR2, and a V_{H}-CDR3; and (2) a light chain variable region comprising a V_{L}-CDR1, a V_{L}-CDR2, and a V_{L}-CDR3, wherein
[0296] The antibody comprises at least 1 V_{H}-CDR having at least 90% identity to any one of the amino acid sequences of SEQ ID Nos: 27-169, 801, 802, 953, 954, 1763-1813.

[0297] 34. The method of any one of the preceding arrangements, wherein the antibody comprises (1) a heavy chain variable region comprising a V_{H}-CDR1, a V_{H}-CDR2, and a V_{H}-CDR3; and (2) a light chain variable region comprising a V_{L}-CDR1, a V_{L}-CDR2, and a V_{L}-CDR3, wherein
[0298] the antibody comprises at least 3 V_{H}-CDRs having at least 90% identity to any one of the amino acid sequences of SEQ ID NOs: 27-169, 801, 802, 953, 954, 1763-1813.

[0299] 35. The method of any one of the preceding arrangements, wherein the antibody comprises at least 1 CDR having at least 90% identity to any one of the amino acid sequences of SEQ ID NOs: 27-296, 801, 802, 953, 954, 1763-1864.

[0300] 36. The method of any one of the preceding arrangements, wherein the antibody comprises at least 6 CDRs having at least 90% identity to any one of the amino acid sequences of SEQ ID Nos: 27-296, 801, 802, 953, 954, 1763-1864.

[0301] 37. The method of any one of the preceding arrangements, wherein the antibody comprises (1) a heavy chain variable region comprising a V_{H}-CDR1, a V_{H}-CDR2, and a V_{H}-CDR3; and (2) a light chain variable region comprising a V_{L}-CDR1, a V_{L}-CDR2, and a V_{L}-CDR3, wherein
[0302] the V_{H}-CDR1 comprises an amino acid sequence having at least 90% identity to any one of the amino acid sequences of SEQ ID NOs: 27-70, 1763-1779;
[0303] the V_{H}-CDR2 comprises an amino acid sequence having at least 90% identity to any one of the amino acid sequences of SEQ ID NOs: 71-111, 801, 951, 952, 1780-1796;
[0304] the V_{H}-CDR3 comprises an amino acid sequence having at least 90% identity to any one of the amino acid sequences of SEQ ID NO: 112-169, 802, 953, 954, 1797-1813;
[0305] the V_{L}-CDR1 comprises an amino acid sequence having at least 90% identity to any one of the amino acid sequences of SEQ ID NOs: 170-220, 1814-1830;
[0306] the V_{L}-CDR2 comprises an amino acid sequence having at least 90% identity to any one of the amino acid sequences of SEQ ID NOs: 221-247, 1831-1847; and
[0307] the V_{L}-CDR3 comprises an amino acid sequence having at least 90% identity to any one of the amino acid sequences of SEQ ID NOs: 248-296, 1848-1864.

[0308] 38. The method or composition of any one of the preceding arrangements, wherein the antibody comprises a combination of the V_{H}-CDR1, V_{H}-CDR2, V_{H}-CDR3, V_{L}-CDR1, V_{L}-CDR2, and V_{L}-CDR3 as illustrated in FIG. 32.

[0309] 39. The method or composition of any one of the preceding arrangements, wherein the heavy chain variable region comprises a sequence having at least 90% identity to the sequence selected from SEQ ID NOs: 297-373, 803, 806-820, 940, 955-968, 1067-1109, 1415-1439, 1882-1898.

[0310] 40. The method of any one of the preceding arrangements, wherein the light chain variable region comprises a sequence having at least 90% identity to the sequence selected from SEQ ID NOs: 374-447, 821-835, 941-943, 969-982, 1110-1152, 1440-1464, 1899-1914, 1921.

[0311] 41. The method of any one of the preceding arrangements, wherein the antibody comprises a heavy chain, wherein the heavy chain comprises a sequence having at least 90% identity to the sequence selected from SEQ ID NOs: 448-494, 804, 836-850, 983-996, 1153-1195, 1411, 1465-1489, 1695-1711.

[0312] 42. The method or composition of any one of the preceding arrangements, wherein the antibody comprises a light chain, wherein the light chain comprises a sequence having at least 90% identity to the sequence selected from SEQ ID NOs: 495-538, 805, 851-865, 997-1010, 1196-1238, 1412, 1490-1514, 1746-1762.

[0313] 43. The method of any one of the preceding arrangements, wherein the antibody comprises (1) a heavy chain variable region comprising a V_{H}-CDR1, a V_{H}-CDR2, and a V_{H}-CDR3; and (2) a light chain variable region comprising a V_{L}-CDR1, a V_{L}-CDR2, and a V_{L}-CDR3, wherein
[0314] the V_{H}-CDR1 comprises an amino acid sequence having at least 90% identity to SEQ ID NO: 27;
[0315] the V_{H}-CDR2 comprises an amino acid sequence having at least 90% identity to SEQ ID NO: 71;
[0316] the V_{H}-CDR3 comprises an amino acid sequence having at least 90% identity to SEQ ID NO: 112;
[0317] the V_{H}-CDR1 comprises an amino acid sequence having at least 90% identity to SEQ ID NO: 170;
[0318] the V_{H}-CDR1 comprises an amino acid sequence having at least 90% identity to SEQ ID NO: 221; and
[0319] the V_{H}-CDR1 comprises an amino acid sequence having at least 90%, to SEQ ID NO: 248.

[0320] 44. The method of any one of the preceding arrangements, wherein the antibody comprises (1) a heavy chain variable region comprising a V_{H}-CDR1, a V_{H}-CDR2, and a V_{H}-CDR3; and (2) a light chain variable region comprising a V_{L}-CDR1, a V_{L}-CDR2, and a V_{L}-CDR3, wherein

[0321] 45. the antibody comprises at least 3 V_{H}-CDRs having at least 90% identity to any one of the amino acid sequences of SEQ ID NOs: 27, 71, 112.

[0322] 46. The method of any one of the preceding arrangements, wherein the antibody comprises (1) a heavy chain variable region comprising a V_{H}-CDR1, a V_{H}-CDR2, and a V_{H}-CDR3; and (2) a light chain variable region comprising a V_{L}-CDR1, a V_{L}-CDR2, and a V_{L}-CDR3, wherein
[0323] the antibody comprises at least 3 V_{H}-CDRs having at least 90% identity to any one of the amino acid sequences of SEQ ID NOs: 170, 221, 248.

[0324] 47. The method or composition of any one of the preceding arrangements, wherein the heavy chain variable region comprises a sequence having at least 90% identity to SEQ ID NO: 297.

[0325] 48. The method or composition of any one of the preceding arrangements, wherein the heavy chain variable region comprises a sequence having at least 90% identity to SEQ ID NO: 374.

[0326] 49. The method of any one of the preceding arrangements, wherein the antibody comprises a heavy chain, wherein the heavy chain comprises a sequence having at least 90% identity to the SEQ ID NO: 448.

[0327] 50. The method or composition of any one of the preceding arrangements, wherein the antibody comprises a light chain, wherein the light chain comprises a sequence having at least 90% identity to SEQ ID NO: 495.

[0328] 51. The method of any one of the preceding arrangements, where in the antibody is applied to the subject's eye.

[0329] 52. The method of arrangement 51, wherein the antibody is one of the antibodies provided in any one of the figures provided herewith.

[0330] 53. The method of arrangement 52, wherein the antibody is provided in an amount sufficient for the treatment of the eye disorder, when administered to the eye of the subject.

[0331] 54. The method of arrangement 53, wherein the antibody is applied topically or injected into the subject's eye.

[0332] 55. The method of any one of the preceding arrangements, wherein the antibody is administered intraperitoneally.

[0333] 56. The method of any one of the preceding arrangements, wherein the amount of the antibody administered is a therapeutically effective amount, when administered intraperitoneally.

[0334] 57. The method of any one of the preceding arrangements, wherein:
[0335] a. the antibody is applied to the subject's eye,
[0336] b. the antibody is one of the antibodies provided in any one of the figures provided herewith,
[0337] c. the antibody is provided in an amount sufficient for the treatment of the eye disorder, when administered to the eye of the subject;
[0338] d. the antibody is applied topically or injected into the subject's eye,
[0339] e. the antibody is administered intraperitoneally, and/or the amount of the antibody administered is a therapeutically effective amount, when administered intraperitoneally.

[0340] 58. An anti-Gal3 antibody for use in treating microglia mediated inflammation in a subject in need thereof, the use comprising:
[0341] identifying a subject as having or at risk of having microglia mediated inflammation, and
[0342] administering a therapeutically effective amount of an anti-Gal3 antibody to the subject, wherein
[0343] administration of the antibody to the subject alleviates one or more symptoms of microglia mediated inflammation.

[0344] 59. An anti-Gal3 antibody for use in treating one or more diseases associated with microglia mediated inflammation in a subject in need thereof, the use comprising:
[0345] identifying a subject as having or at risk of having one or more diseases associated with microglia mediated inflammation, and
[0346] administering a therapeutically effective amount of an anti-Gal3 antibody to the subject, wherein
[0347] administration of the antibody to the subject's eye alleviates one or more symptoms of a disease microglia mediated inflammation.

[0348] 60. An anti-Gal3 antibody for use in treating an ocular surface disease in a subject in need thereof, the use comprising:
[0349] identifying a subject as having or at risk of having an ocular surface disease, and
[0350] administering a therapeutically effective amount of an anti-Gal3 antibody to the subject, wherein
[0351] administration of the antibody to the subject alleviates one or more symptoms of ocular surface disease.

[0352] 61. An anti-Gal3 antibody for use in treating macular degeneration in a subject in need thereof, the use comprising:
[0353] identifying a subject as having or at risk of having macular degeneration, and
[0354] administering a therapeutically effective amount of an anti-Gal3 antibody to the
[0355] administration of the antibody to the subject alleviates one or more symptoms of macular degeneration.

[0356] 62. An anti-Gal3 antibody for use in treating dry eye disease in a subject in need thereof, the use comprising:
[0357] identifying a subject as having or at risk of having dry eye disease, and
[0358] administering a therapeutically effective amount of an anti-Gal3 antibody to the subject, wherein
[0359] administration of the antibody to the subject alleviates one or more symptoms of dry eye disease.

[0360] 63. An anti-Gal3 antibody for use in treating age-related vascular dysfunction in a subject in need thereof, the use comprising:
[0361] identifying a subject as having or at risk of having age-related vascular dysfunction, and
[0362] administering a therapeutically effective amount of an anti-Gal3 antibody to the subject, wherein
[0363] administration of the antibody to the subject alleviates one or more symptoms of age-related vascular dysfunction.

[0364] 64. An anti-Gal3 antibody for use in increasing tear formation in a subject in need thereof, the use comprising:
[0365] identifying a subject as likely to benefit from increased tear production,
[0366] administering a therapeutically effective amount of an anti-Gal3 antibody to the subject, wherein
[0367] administration of the anti-Gal3 antibody to the subject increases tear production in the subject as compared to tear production in the subject prior to administration of the antibody.

[0368] 65. An anti-Gal3 antibody for use in decreasing corneal sensitivity in a subject, the use comprising:
[0369] administering a therapeutically effective amount of an anti-Gal3 antibody to the
[0370] administration of the anti-Gal3 antibody to the subject's eye decreases corneal sensitivity in the subject as corneal sensitivity in the subject prior to administration of the antibody.

[0371] 66. An anti-Gal3 antibody for use in treating cataracts in a subject in need thereof, the use comprising:
[0372] identifying a subject as having or at risk of having cataracts, and
[0373] administering a therapeutically effective amount of an anti-Gal3 antibody to the subject, wherein
[0374] administration of the antibody to the subject reduces the severity of the subject's cataracts as compared to the severity of cataracts in the subjects prior to administration of the anti-Gal3 antibody.

[0375] 67. An anti-Gal3 antibody for use in preventing or reducing cataract formation in a subject in need thereof, the use comprising:
[0376] identifying a subject as having or at risk of having cataracts, and
[0377] administering a therapeutically effective amount of an anti-Gal3 antibody to the subject, wherein
[0378] administration of the antibody to the subject reduces or prevents cataract formation in the subject acts as compared to formation of cataracts in the subjects prior to administration of the anti-Gal3 antibody.

[0379] 68. An anti-Gal3 antibody for use in treating diabetic retinopathy in a subject in need thereof, the use comprising:
[0380] identifying a subject as having or at risk of having diabetic retinopathy, and
[0381] administering a therapeutically effective amount of an anti-Gal3 antibody to the subject, wherein
[0382] administration of the antibody to the subject alleviates one or more symptoms of diabetic retinopathy.

[0383] 69. An anti-Gal3 antibody for use in treating retinal drusen in a subject in need thereof, the use comprising:
[0384] identifying a subject as having or at risk of having retinal drusen, and
[0385] administering a therapeutically effective amount of an anti-Gal3 antibody to the
[0386] administration of the antibody to the subject reduces retinal drusen in the subject as compared to retinal drusen in the subject prior to administration of the anti-Gal3 antibody.

[0387] 70. The anti-Gal3 antibody for use of any one of the preceding arrangements, wherein:
[0388] a. the anti-Gal3 antibody is administered intraperitoneally;
[0389] b. the anti-Gal3 antibody is administered topically;
[0390] c. the one or more symptoms comprise dryness of the eye, foreign body sensation, burning sensation, itching, photophobia, eye redness, blurred vision, fluctuating vision, visual fatigue, or any combination thereof;
[0391] d. the ocular surface disease comprises vascular dysfunction, angiogenesis, inflammation, and oxidative stress;
[0392] e. the corneal sensitivity of the subject is decreased by up to about 100% as compared to corneal sensitivity in the subject prior to administration of the anti-Gal3 antibody;
[0393] f. the corneal sensitivity of the subject is decreased by up to about 0.2 g as compared to corneal sensitivity in the subject prior to administration of the anti-Gal3 antibody;
[0394] g. tear production is increased by up to about 10 mm/60 s as compared to tear production in the subject prior to administration of the anti-Gal3 antibody;
[0395] h. tear production is increased by up to about 250% as compared to tear production in the subject prior to administration of the anti-Gal3 antibody.
[0396] i. the anti-Gal3 antibody is administered, daily, twice daily, weekly, bi-weekly, and/or monthly;
[0397] j. the anti-Gal3 antibody is administered for up to about 1, 2, 3, 4, 5, 6, 7, 8, 9, 10, 11, or 12 weeks, or for an amount of time that is in a range defined by any two of the preceding values;
[0398] k. the anti-Gal3 antibody is administered on an ongoing basis;
[0399] l. the anti-Gal3 antibody is topically administered to the subject's eye twice daily;
[0400] m. the anti-Gal3 antibody is topically administered to the subject's eye twice daily for 14 days;
[0401] n. 10 mg/kg of anti-Gal3 antibody is topically administered to the subject's eye;
[0402] o. 10 mg/kg of anti-Gal3 antibody is topically administered to the subject's eye twice daily;
[0403] p. 10 mg/kg of anti-Gal3 antibody is topically administered to the subject's eye twice daily for 14 days; and/or
[0404] q. the anti-Gal3 antibody is TB001 or a binding fragment thereof.

[0405] 71. The anti-Gal3 antibody for use of any one of the preceding arrangements, wherein:
[0406] a. the anti-Gal3 antibody is selected from the group consisting of at least one of: TB001, TB006, 12G5.D7, 13A12.2E5, 14H10.2C9, 15F10.2D6, 19B5.2E6, 20D11.2C6, 20H5.A3, 23H9.2E4, 2D10.2B2, 3B11.2G2, 7D8.2D8, mIMT001, 4A11.2B5, 4A11.H1L1, 4A11.H4L2, 4G2.2G6, 6B3.2D3, 6H6.2D6, 9H2.2H10, 13G4.2F8, 13H12.2F8, 15G7.2A7, 19D9.2E5, 23B10.2B12, 24D12.2H9, F846C.1B2, F846C.1F5, F846C.1H12, F846C.1H5, F846C.2H3, F846TC.14A2, F846TC.14E4, F846TC.16B5, F846TC.7F10, F847C.10B9, F847C.11B1, F847C.12F12, F847C.26F5, F847C.4B10, F849C.8D10, F849C.8H3, 846.2B11, 846.4D5, 846T.1H2, 847.14H4, 846.2D4, 846.2F11, 846T.10B1, 846T.2E3, 846T.4C9, 846T.4E11, 846T.4F5, 846T.8D1, 847.10C9, 847.11D6, 847.15D12, 847.15F9, 847.15H11, 847.20H7, 847.21B11, 847.27B9, 847.28D1, 847.2B8, 847.3B3, 849.1D2, 849.2D7, 849.2F12, 849.4B2, 849.4F12, 849.4F2, 849.5C2, 849.8D12, F847C.21H6, 849.5H1, 847.23F11, 847.16D10, 847.13E2-mH0mL1, 847.13E2-mH0mL2, 847.12C4, 847.4D3, 2D10-VH0-VL0, 2D10-hVH4-HVL1, 2D10-hVH4-HVL2, 2D10-hVH4-HVL3, 2D10-hVH4-HVL4, 2D10-hVH3-HVL1, 2D10-hVH3-HVL2, 2D10-hVH3-HVL3, 2D10-hVH3-HVL4, 20H5.A3-VH3VL1, 20H5.A3-VH3VL3, 20H5.A3-VH4VL1, 20H5.A3-VH5VL1, 20H5.A3-VH5VL3, 20H5.A3-VH6VL1, 20H5.A3-VH6VL3, 2D10-VH0-VL0, 2D10-hVH4-HVL1, 2D10-hVH4-HVL2, 2D10-hVH4-HVL3, 2D10-hVH4-HVL4, 2D10-hVH3-HVL1, 2D10-hVH3-HVL2, 2D10-hVH3-HVL3, 2D10-hVH3-HVL4, 21H6-H0L0, 21H6-H1L1, 21H6-H1L2, 21H6-H1L3, 21H6-H1L4, 21H6-H2L1, 21H6-H2L2, 21H6-H2L3, 21H6-H2L4, 21H6-H3L1, 21H6-H3L2, 21H6-H3L3, 21H6-H3L4, 21H6-H4L1, 21H6-H4L2, 21H6-H4L3, 21H6-H4L4, 21H6-H5L1, 21H6-H5L2, 21H6-H5L3, 21H6-H5L4, 21H6-H6L1, 21H6-H6L2, 21H6-H6L3, 21H6-H6L4, or binding fragment thereof;
[0407] b. the antibody comprises (1) a heavy chain variable region comprising a V_{H}-CDR1, a V_{H}-CDR2, and a V_{H}-CDR3; and (2) a light chain variable region comprising a V_{L}-CDR1, a V_{L}-CDR2, and a V_{L}-CDR3, wherein
[0408] the antibody comprises at least 1 V_{L}-CDR having at least 90% identity to any one of the amino acid sequences of SEQ ID NOs: 170-296, 1814-1864;
[0409] c. the antibody comprises (1) a heavy chain variable region comprising a V_{H}-CDR1, a V_{H}-CDR2, and a V_{H}-CDR3; and (2) a light chain variable region comprising a V_{L}-CDR1, a V_{L}-CDR2, and a V_{L}-CDR3, wherein
   [0410] the antibody comprises at least 3 V_{L}-CDR having at least 90% identity to any one of the amino acid sequences of SEQ ID Nos: 170-296, 1814-1864;
[0411] d. the antibody comprises (1) a heavy chain variable region comprising a V_{H}-CDR1, a V_{H}-CDR2, and a V_{H}-CDR3; and (2) a light chain variable region comprising a V_{L}-CDR1, a V_{L}-CDR2, and a V_{L}-CDR3, wherein
   [0412] the antibody comprises at least 1 V_{H}-CDR having at least 90% identity to any one of the amino acid sequences of SEQ ID Nos: 27-169, 801, 802, 953, 954, 1763-1813;
[0413] e. the antibody comprises (1) a heavy chain variable region comprising a V_{H}-CDR1, a V_{H}-CDR2, and a V_{H}-CDR3; and (2) a light chain variable region comprising a V_{L}-CDR1, a V_{L}-CDR2, and a V_{L}-CDR3, wherein
   [0414] the antibody comprises at least 3 V_{H}-CDRs having at least 90% identity to any one of the amino acid sequences of SEQ ID NOs: 27-169, 801, 802, 953, 954, 1763-1813;
[0415] f. the antibody comprises at least 1 CDR having at least 90% identity to any one of the amino acid sequences of SEQ ID NOs: 27-296, 801, 802, 953, 954, 1763-1864;
[0416] g. the antibody comprises at least 6 CDRs having at least 90% identity to any one of the amino acid sequences of SEQ ID Nos: 27-296, 801, 802, 953, 954, 1763-1864;
[0417] h. the antibody comprises (1) a heavy chain variable region comprising a V_{H}-CDR1, a V_{H}-CDR2, and a V_{H}-CDR3; and (2) a light chain variable region comprising a V_{L}-CDR1, a V_{L}-CDR2, and a V_{L}-CDR3, wherein the V_{H}-CDR1 comprises an amino acid sequence having at least 90% identity to any one of the amino acid sequences of SEQ ID NOs: 27-70, 1763-1779;
   [0418] the V_{H}-CDR2 comprises an amino acid sequence having at least 90% identity to any one of the amino acid sequences of SEQ ID NOs: 71-111, 801, 951, 952, 1780-1796;
   [0419] the V_{H}-CDR3 comprises an amino acid sequence having at least 90% identity to any one of the amino acid sequences of SEQ ID NO: 112-169, 802, 953, 954, 1797-1813;
   [0420] the V_{L}-CDR1 comprises an amino acid sequence having at least 90% identity to any one of the amino acid sequences of SEQ ID NOs: 170-220, 1814-1830;
   [0421] the V_{L}-CDR2 comprises an amino acid sequence having at least 90% identity to any one of the amino acid sequences of SEQ ID NOs: 221-247, 1831-1847; and the V_{L}-CDR3 comprises an amino acid sequence having at least 90% identity to any one of the amino acid sequences of SEQ ID NOs: 248-296, 1848-1864;
[0422] i. the antibody comprises a combination of the V_{H}-CDR1, V_{H}-CDR2, V_{H}-CDR3, V_{L}-CDR1, V_{L}-CDR2, and V_{L}-CDR3 as illustrated in FIG. 32;
[0423] j. the heavy chain variable region comprises a sequence having at least 90% identity to the sequence selected from SEQ ID NOs: 297-373, 803, 806-820, 940, 955-968, 1067-1109, 1415-1439, 1882-1898;
[0424] k. the light chain variable region comprises a sequence having at least 90% identity to the sequence selected from SEQ ID NOs: 374-447, 821-835, 941-943, 969-982, 1110-1152, 1440-1464, 1899-1914, 1921;
[0425] l. the antibody comprises a heavy chain, wherein the heavy chain comprises a sequence having at least 90% identity to the sequence selected from SEQ ID NOs: 448-494, 804, 836-850, 983-996, 1153-1195, 1411, 1465-1489, 1695-1711;
[0426] m. the antibody comprises a light chain, wherein the light chain comprises a sequence having at least 90% identity to the sequence selected from SEQ ID NOS: 495-538, 805, 851-865, 997-1010, 1196-1238, 1412, 1490-1514, 1746-1762;
[0427] n. the antibody comprises (1) a heavy chain variable region comprising a V_{H}-CDR1, a V_{H}-CDR2, and a V_{H}-CDR3; and (2) a light chain variable region comprising a V_{L}-CDR1, a V_{L}-CDR2, and a V_{L}-CDR3, wherein
   [0428] the V_{H}-CDR1 comprises an amino acid sequence having at least 90% identity to SEQ ID NO: 27;
   [0429] the V_{H}-CDR2 comprises an amino acid sequence having at least 90% identity to SEQ ID NO: 71;
   [0430] the V_{H}-CDR3 comprises an amino acid sequence having at least 90% identity to SEQ ID NO: 112;
   [0431] the V_{H}-CDR1 comprises an amino acid sequence having at least 90% identity to SEQ ID NO: 170;
   [0432] the V_{H}-CDR1 comprises an amino acid sequence having at least 90% identity to SEQ ID NO: 221; and
   [0433] the V_{H}-CDR1 comprises an amino acid sequence having at least 90%, to SEQ ID NO: 248;
[0434] o. the antibody comprises (1) a heavy chain variable region comprising a V_{H}-CDR1, a V_{H}-CDR2, and a V_{H}-CDR3; and (2) a light chain variable region comprising a V_{L}-CDR1, a V_{L}-CDR2, and a V_{L}-CDR3, wherein
   [0435] the antibody comprises at least 3 V_{H}-CDRs having at least 90% identity to any one of the amino acid sequences of SEQ ID NOs: 27, 71, 112;
[0436] p. the antibody comprises (1) a heavy chain variable region comprising a V_{H}-CDR1, a V_{H}-CDR2, and a V_{H}-CDR3; and (2) a light chain variable region comprising a V_{L}-CDR1, a V_{L}-CDR2, and a V_{L}-CDR3, wherein
   [0437] the antibody comprises at least 3 V_{H}-CDRs having at least 90% identity to any one of the amino acid sequences of SEQ ID NOs: 170, 221, 248;
[0438] q. the heavy chain variable region comprises a sequence having at least 90% identity to SEQ ID NO: 297;
[0439] r. the heavy chain variable region comprises a sequence having at least 90% identity to SEQ ID NO: 374;
[0440] s. the antibody comprises a heavy chain, wherein the heavy chain comprises a sequence having at least 90% identity to the SEQ ID NO: 448; and/or
[0441] t. the antibody comprises a light chain, wherein the light chain comprises a sequence having at least 90% identity to SEQ ID NO: 495.

[0442] 72. The anti-Gal3 antibody for use of any one of the preceding arrangements, wherein:
[0443] f. the antibody is applied to the subject's eye,
[0444] g. the antibody is one of the antibodies provided in any one of the figures provided herewith,
[0445] h. the antibody is provided in an amount sufficient for the treatment of the eye disorder, when administered to the eye of the subject;
[0446] i. the antibody is applied topically or injected into the subject's eye,
[0447] j. the antibody is administered intraperitoneally, and/or
[0448] k. the amount of the antibody administered is a therapeutically effective amount, when administered intraperitoneally.

### EXAMPLES

### Example 1: Mice with Dry Eye Disease have a Decreased Palpebral Opening

[0449] The effect of dry eye disease on the palpebral opening was examined.

[0450] FIG. 13 is a representation of some embodiments of an anti-Gal3 dosing procedure for treatment of dry eye disease (DED).

[0451] Dry eye disease was induced in Zucker diabetic fatty (ZDF) mice by twice daily topical application of 5 μl of 0.2% Benzalkonium Chloride (BAC) (Sigma-Aldrich, St. Louis, MO) in sterile PBS buffer, to the eyes, for 14 days. A baseline assessment of the severity of the DED was made prior to induction of DED by using optical coherence tomography (OCT), behavioral tests, and other measures of DED severity. The assessments were repeated at the conclusion of BAC administration. DED mice were then either treated with twice weekly administration of 10 mg/kg TB001 anti-Gal3 antibody (treatment A), 10 mg/kg MOPC21 (treatment B), or PBS (treatment C). Assessments of DED severity was again measured and compared to the DED and baseline phenotypes.

[0452] FIG. 14 shows images of some embodiments of palpebral opening in mice with normal eyes and mice with dry eye disease (DED).

[0453] FIG. 15 is a graph quantifying palpebral opening in some embodiments of mice with normal and mice with dry eye disease (DED).

[0454] As is clear from FIG. 15, mice with DED have decreased palpebral openings as compared to mice with normal eyes.

### Example 2: Anti-Gal3 Antibodies Decrease Corneal Sensitivity

[0455] The effect of anti-Gal3 antibodies on corneal sensitivity was assessed in mice with DED.

[0456] Dry eye disease was induced in Zucker diabetic fatty (ZDF) mice by twice daily topical application of 5 μl of 0.2% Benzalkonium Chloride (BAC) (Sigma-Aldrich, St. Louis, MO) in sterile PBS buffer, to the eyes, for 14 days. A baseline assessment of corneal sensitivity was made prior to induction of DED using a von Frey test. The assessments were repeated at the conclusion of BAC administration. DED mice were then either treated with twice weekly administration of 10 mg/kg TB001 anti-Gal3 antibody (treatment A), 10 mg/kg MOPC21 (treatment B), or PBS (treatment C). Assessments of corneal sensitivity was again measured and compared to the DED and baseline phenotypes.

[0457] FIG. 16 is a graph depicting the results of a von Frey filament test on some embodiments of mice with normal eyes and mice with dry eye disease treated with or without anti-Gal3 antibody.

[0458] FIG. 17 is a graph depicting the results of a von Frey filament test on some embodiments of mice with normal eyes and mice with dry eye disease treated with or without anti-Gal3 antibody.

[0459] As is clear from FIG. 16 and FIG. 17, mice with DED have increased corneal sensitivity, this sensitivity is decreased in mice treated with anti-Gal3 antibody.

### Example 3: Anti-Gal3 Antibodies Increase Tear Formation in Dry Eye Disease Subject's

[0460] The effect of anti-Gal3 antibodies on tear formation was assessed in mice with DED.

[0461] Dry eye disease was induced in Zucker diabetic fatty (ZDF) mice by twice daily topical application of 5 μl of 0.2% Benzalkonium Chloride (BAC) (Sigma-Aldrich, St. Louis, MO) in sterile PBS buffer, to the eyes, for 14 days. A baseline assessment of tear formation was made prior to induction of DED using a Schirmer's test. The assessments were repeated at the conclusion of BAC administration. DED mice were then either treated with twice weekly administration of 10 mg/kg TB001 anti-Gal3 antibody (treatment A), 10 mg/kg MOPC21 (treatment B), or PBS (treatment C). Assessments of tear formation was again measured and compared to the DED and baseline phenotypes.

[0462] FIG. 18 is an illustration depicting some embodiments of a Schirmer's test for measuring tear production.

[0463] FIG. 19 is a pair of graphs quantifying tear production in female (top) and male (bottom) mice with dry eye disease following treatment with or without anti-Gal3 antibody.

[0464] As is clear from FIG. 19, tear production in mice with DED is increased following anti-Gal3 antibody administration.

### Example 4: Anti-Gal3 Antibodies Decrease Gal3 Concentration in Tears

[0465] The effect of anti-Gal3 antibodies on Gal3 concentration in tears was assessed in mice with DED.

[0466] Dry eye disease was induced in Zucker diabetic fatty (ZDF) mice by twice daily topical application of 5 μl of 0.2% Benzalkonium Chloride (BAC) (Sigma-Aldrich, St. Louis, MO) in sterile PBS buffer, to the eyes, for 14 days. A baseline assessment of Gal3 concentration in tears was made prior to induction of DED. The assessments were repeated at the conclusion of BAC administration. DED mice were then either treated with twice weekly administration of 10 mg/kg TB001 anti-Gal3 antibody (treatment A), 10 mg/kg MOPC21 (treatment B), or PBS (treatment C). Gal3 concentration in tears was again measured and compared to the DED and baseline phenotypes.

[0467] FIG. 20 is a pair of graphs depicting quantification of Gal-3 concentration in the tears of mice with normal eyes and mice with dry eye disease with or without anti-Gal3 antibody administration.

[0468] As is clear from FIG. 20, Gal3 concentration is increased in the tears of mice with DED and is decreased following anti-Gal3 antibody administration.

### Example 5: Anti-Gal3 Antibodies have No Effect on Subject Body Weight

[0469] The effect of anti-Gal3 antibodies on a subject's body weight was assessed in mice with DED.

[0470] Dry eye disease was induced in Zucker diabetic fatty (ZDF) mice by twice daily topical application of 5 μl of 0.2% Benzalkonium Chloride (BAC) (Sigma-Aldrich, St. Louis, MO) in sterile PBS buffer, to the eyes, for 14 days. A baseline assessment of body weight was made prior to induction of DED. The assessments were repeated at the conclusion of BAC administration. DED mice were then either treated with twice weekly administration of 10 mg/kg TB001 anti-Gal3 antibody (treatment A), 10 mg/kg MOPC21 (treatment B), or PBS (treatment C). Body weight was again measured and compared to the DED and baseline phenotypes.

[0471] FIG. 21 is a pair of graphs depicting the body weight of female (top) and male (bottom) mice treated with or without anti-Gal3 antibodies.

[0472] As is clear from FIG. 21, administration of anti-Gal3 antibodies has no apparent effect on mouse body weight.

### Example 6: Anti-Gal3 Antibodies Decrease Cataract Severity in Dry Eye Disease Subject's

[0473] The effect of anti-Gal3 antibodies on cataract severity was assessed in mice with DED.

[0474] Dry eye disease was induced in Zucker diabetic fatty (ZDF) mice by twice daily topical application of 5 μl of 0.2% Benzalkonium Chloride (BAC) (Sigma-Aldrich, St. Louis, MO) in sterile PBS buffer, to the eyes, for 14 days. A baseline assessment or staging of cataract severity was made prior to induction of DED. The staging was repeated at the conclusion of BAC administration. DED mice were then either treated with twice weekly administration of 10 mg/kg TB001 anti-Gal3 antibody (treatment A), 10 mg/kg MOPC21 (treatment B), or PBS (treatment C). Cataract severity was again measured and compared to the DED and baseline phenotypes.

[0475] FIG. 22 shows images of some embodiments of cataract staging in mice with normal eyes and mice with dry eye disease (DED).

[0476] FIG. 23 is a pair of graphs depicting cataract staging in some embodiments of mice treated with or without anti-Gal3 antibody.

The application's sequence listing, which the Patent Office published only in electronic form, follows.

SEQUENCE LISTING (1927 sequences)

SEQ ID NO: 1 - protein, 250 aa, Homo sapiens [sequence omitted]

SEQ ID NO: 2 - protein, 264 aa, Homo sapiens
MHSKTPCGCFKPWKMADNFSLHDALSGSGNPNPQGWPGAWGNQPAGAGGYPGASYPGAYPGQAPPGAYPGQAPPGAYPGAPGAYPGAPAPGVYPGPPSGPGAYPSSGQPSATGAYPATGPYGAPAGPLIVPYNLPLPGGVVPRMLITILGTVKPNANRIALDFQRGNDVAFHFNPRFNENNRRVIVCNTKLDNNWGREERQSVFPFESGKPFKIQVLVEPDHFKVAVNDAHLLQYNHRVKKLNEISKLGISGDIDLTSASYTMI

SEQ ID NO: 3 - protein, 20 aa, synthetic construct
  REGION 1..20: note = Gal3 Peptide 1
ADNFSLHDALSGSGNPNPQG

SEQ ID NO: 4 - protein, 20 aa, synthetic construct
  REGION 1..20: note = Gal3 Peptide 2
SGSGNPNPQGWPGAWGNQPA

SEQ ID NO: 5 - protein, 20 aa, synthetic construct
  REGION 1..20: note = Gal3 Peptide 3
WPGAWGNQPAGAGGYPGASY

SEQ ID NO: 6 - protein, 20 aa, synthetic construct
  REGION 1..20: note = Gal3 Peptide 4
GAGGYPGASYPGAYPGQAPP

SEQ ID NO: 7 - protein, 20 aa, synthetic construct
  REGION 1..20: note = Gal3 Peptide 5
PGAYPGQAPPGAYPGQAPPG

SEQ ID NO: 8 - protein, 20 aa, synthetic construct
  REGION 1..20: note = Gal3 Peptide 6
GAYPGQAPPGAYPGAPGAYP

SEQ ID NO: 9 - protein, 20 aa, synthetic construct
  REGION 1..20: note = Gal3 Peptide 7
AYPGAPGAYPGAPAPGVYPG

SEQ ID NO: 10 - protein, 20 aa, synthetic construct
  REGION 1..20: note = Gal3 Peptide 8
GAPAPGVYPGPPSGPGAYPS

SEQ ID NO: 11 - protein, 20 aa, synthetic construct
  REGION 1..20: note = Gal3 Peptide 9
PPSGPGAYPSSGQPSATGAY

SEQ ID NO: 12 - protein, 20 aa, synthetic construct
  REGION 1..20: note = Gal3 Peptide 10
SGQPSATGAYPATGPYGAPA

SEQ ID NO: 13 - protein, 20 aa, synthetic construct
  REGION 1..20: note = Gal3 Peptide 11
PATGPYGAPAGPLIVPYNLP

SEQ ID NO: 14 - protein, 20 aa, synthetic construct
  REGION 1..20: note = Gal3 Peptide 12
GPLIVPYNLPLPGGVVPRML

SEQ ID NO: 15 - protein, 20 aa, synthetic construct
  REGION 1..20: note = Gal3 Peptide 13
LPGGVVPRMLITILGTVKPN

SEQ ID NO: 16 - protein, 20 aa, synthetic construct
  REGION 1..20: note = Gal3 Peptide 14
ITILGTVKPNANRIALDFQR

SEQ ID NO: 17 - protein, 20 aa, synthetic construct
  REGION 1..20: note = Gal3 Peptide 15
ANRIALDFQRGNDVAFHFNP

SEQ ID NO: 18 - protein, 20 aa, synthetic construct
  REGION 1..20: note = Gal3 Peptide 16
GNDVAFHFNPRFNENNRRVI

SEQ ID NO: 19 - protein, 20 aa, synthetic construct
  REGION 1..20: note = Gal3 Peptide 17
RFNENNRRVIVCNTKLDNNW

SEQ ID NO: 20 - protein, 20 aa, synthetic construct
  REGION 1..20: note = Gal3 Peptide 18
VCNTKLDNNWGREERQSVFP

SEQ ID NO: 21 - protein, 20 aa, synthetic construct
  REGION 1..20: note = Gal3 Peptide 19
GREERQSVFPFESGKPFKIQ

SEQ ID NO: 22 - protein, 20 aa, synthetic construct
  REGION 1..20: note = Gal3 Peptide 20
FESGKPFKIQVLVEPDHFKV

SEQ ID NO: 23 - protein, 20 aa, synthetic construct
  REGION 1..20: note = Gal3 Peptide 21
VLVEPDHFKVAVNDAHLLQY

SEQ ID NO: 24 - protein, 20 aa, synthetic construct
  REGION 1..20: note = Gal3 Peptide 22
AVNDAHLLQYNHRVKKLNEI

SEQ ID NO: 25 - protein, 20 aa, synthetic construct
  REGION 1..20: note = Gal3 Peptide 23
NHRVKKLNEISKLGISGDID

SEQ ID NO: 26 - protein, 19 aa, synthetic construct
  REGION 1..19: note = Gal3 Peptide 24
SKLGISGDIDLTSASYTMI

SEQ ID NO: 27 - protein, 7 aa, synthetic construct
  REGION 1..7: note = VH_CDR1_1
GYTFTNY

SEQ ID NO: 28 - protein, 7 aa, synthetic construct
  REGION 1..7: note = VH_CDR1_2
GFSLTSY

SEQ ID NO: 29 - protein, 8 aa, synthetic construct
  REGION 1..8: note = VH_CDR1_3
GYTFTNYW

SEQ ID NO: 30 - protein, 8 aa, synthetic construct
  REGION 1..8: note = VH_CDR1_4
GYTFTNYG

SEQ ID NO: 31 - protein, 7 aa, synthetic construct
  REGION 1..7: note = VH_CDR1_5
GYSFTNY

SEQ ID NO: 32 - protein, 7 aa, synthetic construct
  REGION 1..7: note = VH_CDR1_6
GYTFTDY

SEQ ID NO: 33 - protein, 7 aa, synthetic construct
  REGION 1..7: note = VH_CDR1_7
GYKFKTY

SEQ ID NO: 34 - protein, 7 aa, synthetic construct
  REGION 1..7: note = VH_CDR1_8
GYTFTTY

SEQ ID NO: 35 - protein, 7 aa, synthetic construct
  REGION 1..7: note = VH_CDR1_9
GFAFSSY

SEQ ID NO: 36 - protein, 7 aa, synthetic construct
  REGION 1..7: note = VH_CDR1_10
GYTFTDF

SEQ ID NO: 37 - protein, 7 aa, synthetic construct
  REGION 1..7: note = VH_CDR1_11
GYAFTTY

SEQ ID NO: 38 - protein, 7 aa, synthetic construct
  REGION 1..7: note = VH_CDR1_12
GFTFSSY

SEQ ID NO: 39 - protein, 8 aa, synthetic construct
  REGION 1..8: note = VH_CDR1_13
GFSLTSYG

SEQ ID NO: 40 - protein, 7 aa, synthetic construct
  REGION 1..7: note = VH_CDR1_14
GYTFTSY

SEQ ID NO: 41 - protein, 7 aa, synthetic construct
  REGION 1..7: note = VH_CDR1_15
GYTFSDY

SEQ ID NO: 42 - protein, 8 aa, synthetic construct
  REGION 1..8: note = VH_CDR1_16
GYTFTNFG

SEQ ID NO: 43 - protein, 8 aa, synthetic construct
  REGION 1..8: note = VH_CDR1_17
GFTFSSYA

SEQ ID NO: 44 - protein, 10 aa, synthetic construct
  REGION 1..10: note = VH_CDR1_18
GFSLSTSGMG

SEQ ID NO: 45 - protein, 8 aa, synthetic construct
  REGION 1..8: note = VH_CDR1_19
GFTFSNYG

SEQ ID NO: 46 - protein, 8 aa, synthetic construct
  REGION 1..8: note = VH_CDR1_20
GYIFTNYG

SEQ ID NO: 47 - protein, 8 aa, synthetic construct
  REGION 1..8: note = VH_CDR1_21
GNTFTDHN

SEQ ID NO: 48 - protein, 8 aa, synthetic construct
  REGION 1..8: note = VH_CDR1_22
GYTFTSYW

SEQ ID NO: 49 - protein, 10 aa, synthetic construct
  REGION 1..10: note = VH_CDR1_23
GFSLSTFGMG

SEQ ID NO: 50 - protein, 8 aa, synthetic construct
  REGION 1..8: note = VH_CDR1_24
GYTFTSYD

SEQ ID NO: 51 - protein, 8 aa, synthetic construct
  REGION 1..8: note = VH_CDR1_25
GFTFSNYW

SEQ ID NO: 52 - protein, 8 aa, synthetic construct
  REGION 1..8: note = VH_CDR1_26
GYTFTSYV

SEQ ID NO: 53 - protein, 8 aa, synthetic construct
  REGION 1..8: note = VH_CDR1_27
GYSFTNYI

SEQ ID NO: 54 - protein, 8 aa, synthetic construct
  REGION 1..8: note = VH_CDR1_28
GYTFRSYD

SEQ ID NO: 55 - protein, 8 aa, synthetic construct
  REGION 1..8: note = VH_CDR1_29
GFTFSNFW

SEQ ID NO: 56 - protein, 8 aa, synthetic construct
  REGION 1..8: note = VH_CDR1_30
EYAFNNYM

SEQ ID NO: 57 - protein, 8 aa, synthetic construct
  REGION 1..8: note = VH_CDR1_31
GYSFTGYT

SEQ ID NO: 58 - protein, 8 aa, synthetic construct
  REGION 1..8: note = VH_CDR1_32
GFSLINYG

SEQ ID NO: 59 - protein, 8 aa, synthetic construct
  REGION 1..8: note = VH_CDR1_33
GYTFNNYW

SEQ ID NO: 60 - protein, 8 aa, synthetic construct
  REGION 1..8: note = VH_CDR1_34
GFSLSSYG

SEQ ID NO: 61 - protein, 8 aa, synthetic construct
  REGION 1..8: note = VH_CDR1_35
GYSFTNYW

SEQ ID NO: 62 - protein, 8 aa, synthetic construct
  REGION 1..8: note = VH_CDR1_36
GYSFTSYW

SEQ ID NO: 63 - protein, 9 aa, synthetic construct
  REGION 1..9: note = VH_CDR1_37
GYSITSGYY

SEQ ID NO: 64 - protein, 8 aa, synthetic construct
  REGION 1..8: note = VH_CDR1_38
GFNIKDYY

SEQ ID NO: 65 - protein, 8 aa, synthetic construct
  REGION 1..8: note = VH_CDR1_39
RYTFTDYN

SEQ ID NO: 66 - protein, 8 aa, synthetic construct
  REGION 1..8: note = VH_CDR1_40
GYTFTIFG

SEQ ID NO: 67 - protein, 8 aa, synthetic construct
  REGION 1..8: note = VH_CDR1_41
GYTFTSSW

SEQ ID NO: 68 - protein, 8 aa, synthetic construct
  REGION 1..8: note = VH_CDR1_42
GYTFTGYW

SEQ ID NO: 69 - protein, 8 aa, synthetic construct
  REGION 1..8: note = VH_CDR1_43
GYSFTDYN

SEQ ID NO: 70 - protein, 8 aa, synthetic construct
  REGION 1..8: note = VH_CDR1_44
GFSLTIYG

SEQ ID NO: 71 - protein, 6 aa, synthetic construct
  REGION 1..6: note = VH_CDR2_1
NTNTGE

SEQ ID NO: 72 - protein, 8 aa, synthetic construct
  REGION 1..8: note = VH_CDR2_2
IYPGSGNT

SEQ ID NO: 73 - protein, 8 aa, synthetic construct
  REGION 1..8: note = VH_CDR2_3
IYPGTGNT

SEQ ID NO: 74 - protein, 8 aa, synthetic construct
  REGION 1..8: note = VH_CDR2_4
INTYSGVP

SEQ ID NO: 75 - protein, 8 aa, synthetic construct
  REGION 1..8: note = VH_CDR2_5
ISDGGVYT

SEQ ID NO: 76 - protein, 8 aa, synthetic construct
  REGION 1..8: note = VH_CDR2_6
INPKNGGI

SEQ ID NO: 77 - protein, 8 aa, synthetic construct
  REGION 1..8: note = VH_CDR2_7
VNTYSGVP

SEQ ID NO: 78 - protein, 8 aa, synthetic construct
  REGION 1..8: note = VH_CDR2_8
IYPGSNDT

SEQ ID NO: 79 - protein, 8 aa, synthetic construct
  REGION 1..8: note = VH_CDR2_9
ISDGGIYT

SEQ ID NO: 80 - protein, 8 aa, synthetic construct
  REGION 1..8: note = VH_CDR2_10
INTHSGVP

SEQ ID NO: 81 - protein, 7 aa, synthetic construct
  REGION 1..7: note = VH_CDR2_11
IWSGGST

SEQ ID NO: 82 - protein, 8 aa, synthetic construct
  REGION 1..8: note = VH_CDR2_12
IDPSDSET

SEQ ID NO: 83 - protein, 8 aa, synthetic construct
  REGION 1..8: note = VH_CDR2_13
IHPNSGST

SEQ ID NO: 84 - protein, 8 aa, synthetic construct
  REGION 1..8: note = VH_CDR2_14
INPNNGGT

SEQ ID NO: 85 - protein, 8 aa, synthetic construct
  REGION 1..8: note = VH_CDR2_15
IYPVSVNT

SEQ ID NO: 86 - protein, 8 aa, synthetic construct
  REGION 1..8: note = VH_CDR2_16
INTYTGEP

SEQ ID NO: 87 - protein, 7 aa, synthetic construct
  REGION 1..7: note = VH_CDR2_17
ISSGGDT

SEQ ID NO: 88 - protein, 7 aa, synthetic construct
  REGION 1..7: note = VH_CDR2_18
IWWDDDK

SEQ ID NO: 89 - protein, 8 aa, synthetic construct
  REGION 1..8: note = VH_CDR2_19
ISSGGSYT

SEQ ID NO: 90 - protein, 8 aa, synthetic construct
  REGION 1..8: note = VH_CDR2_20
IYPYNGGT

SEQ ID NO: 91 - protein, 7 aa, synthetic construct
  REGION 1..7: note = VH_CDR2_21
ISSGGST

SEQ ID NO: 92 - protein, 8 aa, synthetic construct
  REGION 1..8: note = VH_CDR2_22
IYPGSSSI

SEQ ID NO: 93 - protein, 8 aa, synthetic construct
  REGION 1..8: note = VH_CDR2_23
IYPGDGST

SEQ ID NO: 94 - protein, 10 aa, synthetic construct
  REGION 1..10: note = VH_CDR2_24
IRLKSNNYAT

SEQ ID NO: 95 - protein, 8 aa, synthetic construct
  REGION 1..8: note = VH_CDR2_25
INTNTGES

SEQ ID NO: 96 - protein, 10 aa, synthetic construct
  REGION 1..10: note = VH_CDR2_26
LRLKSNNYAT

SEQ ID NO: 97 - protein, 8 aa, synthetic construct
  REGION 1..8: note = VH_CDR2_27
INPYNDGT

SEQ ID NO: 98 - protein, 8 aa, synthetic construct
  REGION 1..8: note = VH_CDR2_28
IFPGEGIS

SEQ ID NO: 99 - protein, 8 aa, synthetic construct
  REGION 1..8: note = VH_CDR2_29
IFPGDGTT

SEQ ID NO: 100 - protein, 8 aa, synthetic construct
  REGION 1..8: note = VH_CDR2_30
INPGSGAT

SEQ ID NO: 101 - protein, 8 aa, synthetic construct
  REGION 1..8: note = VH_CDR2_31
INPYNGGT

SEQ ID NO: 102 - protein, 8 aa, synthetic construct
  REGION 1..8: note = VH_CDR2_32
FLPGDGSS

SEQ ID NO: 103 - protein, 7 aa, synthetic construct
  REGION 1..7: note = VH_CDR2_33
IWAGGST

SEQ ID NO: 104 - protein, 8 aa, synthetic construct
  REGION 1..8: note = VH_CDR2_34
INTNTGEP

SEQ ID NO: 105 - protein, 7 aa, synthetic construct
  REGION 1..7: note = VH_CDR2_35
ISYDGRN

SEQ ID NO: 106 - protein, 8 aa, synthetic construct
  REGION 1..8: note = VH_CDR2_36
IYPEDDET

SEQ ID NO: 107 - protein, 8 aa, synthetic construct
  REGION 1..8: note = VH_CDR2_37
IYPNNGGT

SEQ ID NO: 108 - protein, 8 aa, synthetic construct
  REGION 1..8: note = VH_CDR2_38
VNTYTGEP

SEQ ID NO: 109 - protein, 8 aa, synthetic construct
  REGION 1..8: note = VH_CDR2_39
IDPYNDAT

SEQ ID NO: 110 - protein, 7 aa, synthetic construct
  REGION 1..7: note = VH_CDR2_40
VAWDDKK

SEQ ID NO: 111 - protein, 7 aa, synthetic construct
  REGION 1..7: note = VH_CDR2_41
ISSGDSP

SEQ ID NO: 112 - protein, 9 aa, synthetic construct
  REGION 1..9: note = VH_CDR3_1
APYDNFFAY

SEQ ID NO: 113 - protein, 9 aa, synthetic construct
  REGION 1..9: note = VH_CDR3_2
STAPGGFDV

SEQ ID NO: 114 - protein, 15 aa, synthetic construct
  REGION 1..15: note = VH_CDR3_3
ARFAYYYGSGGYFDY

SEQ ID NO: 115 - protein, 12 aa, synthetic construct
  REGION 1..12: note = VH_CDR3_4
ARDGNYGDPMDY

SEQ ID NO: 116 - protein, 10 aa, synthetic construct
  REGION 1..10: note = VH_CDR3_5
STPYEYDGAY

SEQ ID NO: 117 - protein, 6 aa, synthetic construct
  REGION 1..6: note = VH_CDR3_6
VRDGGY

SEQ ID NO: 118 - protein, 9 aa, synthetic construct
  REGION 1..9: note = VH_CDR3_7
ARGPYAMDY

SEQ ID NO: 119 - protein, 8 aa, synthetic construct
  REGION 1..8: note = VH_CDR3_8
TSGYGFPY

SEQ ID NO: 120 - protein, 13 aa, synthetic construct
  REGION 1..13: note = VH_CDR3_9
ANYFGCSGWFFDV

SEQ ID NO: 121 - protein, 12 aa, synthetic construct
  REGION 1..12: note = VH_CDR3_10
TRDGNDGDAMDN

SEQ ID NO: 122 - protein, 14 aa, synthetic construct
  REGION 1..14: note = VH_CDR3_11
AKGPYDYDLGWFAY

SEQ ID NO: 123 - protein, 8 aa, synthetic construct
  REGION 1..8: note = VH_CDR3_12
ARHGYYDY

SEQ ID NO: 124 - protein, 12 aa, synthetic construct
  REGION 1..12: note = VH_CDR3_13
TRWGIYYYARDY

SEQ ID NO: 125 - protein, 10 aa, synthetic construct
  REGION 1..10: note = VH_CDR3_14
AVPYEYDGAY

SEQ ID NO: 126 - protein, 10 aa, synthetic construct
  REGION 1..10: note = VH_CDR3_15
ATPYEYDGAY

SEQ ID NO: 127 - protein, 5 aa, synthetic construct
  REGION 1..5: note = VH_CDR3_16
AYLDY

SEQ ID NO: 128 - protein, 14 aa, synthetic construct
  REGION 1..14: note = VH_CDR3_17
AKSPDGYDVAWFGY

SEQ ID NO: 129 - protein, 15 aa, synthetic construct
  REGION 1..15: note = VH_CDR3_18
ARWGGYAGDYYAMDF

SEQ ID NO: 130 - protein, 15 aa, synthetic construct
  REGION 1..15: note = VH_CDR3_19
ARWGGYDGDYYAMDY

SEQ ID NO: 131 - protein, 15 aa, synthetic construct
  REGION 1..15: note = VH_CDR3_20
ARWGGYAGDYYAMDY

SEQ ID NO: 132 - protein, 10 aa, synthetic construct
  REGION 1..10: note = VH_CDR3_21
ASYGNSLFDY

SEQ ID NO: 133 - protein, 7 aa, synthetic construct
  REGION 1..7: note = VH_CDR3_22
VRYTMDY

SEQ ID NO: 134 - protein, 16 aa, synthetic construct
  REGION 1..16: note = VH_CDR3_23
ARNLYDGSYGYYAMDY

SEQ ID NO: 135 - protein, 16 aa, synthetic construct
  REGION 1..16: note = VH_CDR3_24
ARHAHYYGVSPYYFDY

SEQ ID NO: 136 - protein, 12 aa, synthetic construct
  REGION 1..12: note = VH_CDR3_25
AKFGNYVGAMDY

SEQ ID NO: 137 - protein, 13 aa, synthetic construct
  REGION 1..13: note = VH_CDR3_26
ARGEYDYLAWFAY

SEQ ID NO: 138 - protein, 11 aa, synthetic construct
  REGION 1..11: note = VH_CDR3_27
TRFTTVVEMDY

SEQ ID NO: 139 - protein, 5 aa, synthetic construct
  REGION 1..5: note = VH_CDR3_28
ARWGY

SEQ ID NO: 140 - protein, 13 aa, synthetic construct
  REGION 1..13: note = VH_CDR3_29
ARIDYGDYVGFAY

SEQ ID NO: 141 - protein, 11 aa, synthetic construct
  REGION 1..11: note = VH_CDR3_30
AREAASNAMDY

SEQ ID NO: 142 - protein, 13 aa, synthetic construct
  REGION 1..13: note = VH_CDR3_31
TRHYGFPYWYFDV

SEQ ID NO: 143 - protein, 11 aa, synthetic construct
  REGION 1..11: note = VH_CDR3_32
QPGGVTGTLTT

SEQ ID NO: 144 - protein, 7 aa, synthetic construct
  REGION 1..7: note = VH_CDR3_33
ARYPMDY

SEQ ID NO: 145 - protein, 11 aa, synthetic construct
  REGION 1..11: note = VH_CDR3_34
ARLLFYYAMDY

SEQ ID NO: 146 - protein, 11 aa, synthetic construct
  REGION 1..11: note = VH_CDR3_35
AREATAGAMDY

SEQ ID NO: 147 - protein, 11 aa, synthetic construct
  REGION 1..11: note = VH_CDR3_36
AREGAGSWFAY

SEQ ID NO: 148 - protein, 7 aa, synthetic construct
  REGION 1..7: note = VH_CDR3_37
TYNDLGY

SEQ ID NO: 149 - protein, 16 aa, synthetic construct
  REGION 1..16: note = VH_CDR3_38
ARKDDYYGSSPYALDY

SEQ ID NO: 150 - protein, 9 aa, synthetic construct
  REGION 1..9: note = VH_CDR3_39
VRDDYDSDY

SEQ ID NO: 151 - protein, 14 aa, synthetic construct
  REGION 1..14: note = VH_CDR3_40
ARIYYYGRGYAMDY

SEQ ID NO: 152 - protein, 15 aa, synthetic construct
  REGION 1..15: note = VH_CDR3_41
ARGDYYYGTRGPMDY

SEQ ID NO: 153 - protein, 8 aa, synthetic construct
  REGION 1..8: note = VH_CDR3_42
ARWGAMDY

SEQ ID NO: 154 - protein, 15 aa, synthetic construct
  REGION 1..15: note = VH_CDR3_43
ARDRASLLRPGAMDY

SEQ ID NO: 155 - protein, 11 aa, synthetic construct
  REGION 1..11: note = VH_CDR3_44
ARLDYDYDEDY

SEQ ID NO: 156 - protein, 14 aa, synthetic construct
  REGION 1..14: note = VH_CDR3_45
ASPPSGYDYDVFAS

SEQ ID NO: 157 - protein, 14 aa, synthetic construct
  REGION 1..14: note = VH_CDR3_46
ASPPSGYDYDVFAY

SEQ ID NO: 158 - protein, 14 aa, synthetic construct
  REGION 1..14: note = VH_CDR3_47
AKPPYDYDGAWFAY

SEQ ID NO: 159 - protein, 7 aa, synthetic construct
  REGION 1..7: note = VH_CDR3_48
ATGRPDY

SEQ ID NO: 160 - protein, 7 aa, synthetic construct
  REGION 1..7: note = VH_CDR3_49
AKGRPDY

SEQ ID NO: 161 - protein, 11 aa, synthetic construct
  REGION 1..11: note = VH_CDR3_50
AGYDFLWYFDV

SEQ ID NO: 162 - protein, 12 aa, synthetic construct
  REGION 1..12: note = VH_CDR3_51
ARSGGYYVWFAY

SEQ ID NO: 163 - protein, 14 aa, synthetic construct
  REGION 1..14: note = VH_CDR3_52
ARSYYDGSYDAMDY

SEQ ID NO: 164 - protein, 7 aa, synthetic construct
  REGION 1..7: note = VH_CDR3_53
ARGWFAY

SEQ ID NO: 165 - protein, 14 aa, synthetic construct
  REGION 1..14: note = VH_CDR3_54
AKPPHDYDQAWFAY

SEQ ID NO: 166 - protein, 9 aa, synthetic construct
  REGION 1..9: note = VH_CDR3_55
VNSNYESGY

SEQ ID NO: 167 - protein, 9 aa, synthetic construct
  REGION 1..9: note = VH_CDR3_56
ANSNYASGS

SEQ ID NO: 168 - protein, 13 aa, synthetic construct
  REGION 1..13: note = VH_CDR3_57
ARWGRYEYYAMDY

SEQ ID NO: 169 - protein, 9 aa, synthetic construct
  REGION 1..9: note = VH_CDR3_58
TMTGGPINY

SEQ ID NO: 170 - protein, 16 aa, synthetic construct
  REGION 1..16: note = VL-CDR1_1
RSSKSLLYKDGKTYLN

SEQ ID NO: 171 - protein, 11 aa, synthetic construct
  REGION 1..11: note = VL-CDR1_2
KSLLHSDGITY

SEQ ID NO: 172 - protein, 6 aa, synthetic construct
  REGION 1..6: note = VL-CDR1_3
QGINSN

SEQ ID NO: 173 - protein, 11 aa, synthetic construct
  REGION 1..11: note = VL-CDR1_4
QSLLYTNGKTY

SEQ ID NO: 174 - protein, 11 aa, synthetic construct
  REGION 1..11: note = VL-CDR1_5
QSLFDSDGKTY

SEQ ID NO: 175 - protein, 11 aa, synthetic construct
  REGION 1..11: note = VL-CDR1_6
QSIVHNNGNTY

SEQ ID NO: 176 - protein, 6 aa, synthetic construct
  REGION 1..6: note = VL-CDR1_7
QGINNY

SEQ ID NO: 177 - protein, 6 aa, synthetic construct
  REGION 1..6: note = VL-CDR1_8
QNIYIW

SEQ ID NO: 178 - protein, 6 aa, synthetic construct
  REGION 1..6: note = VL-CDR1_9
QDISNY

SEQ ID NO: 179 - protein, 11 aa, synthetic construct
  REGION 1..11: note = VL-CDR1_10
QSIVHSNGNTY

SEQ ID NO: 180 - protein, 11 aa, synthetic construct
  REGION 1..11: note = VL-CDR1_11
QSLLYTDGKTY

SEQ ID NO: 181 - protein, 6 aa, synthetic construct
  REGION 1..6: note = VL-CDR1_12
QSVSND

SEQ ID NO: 182 - protein, 6 aa, synthetic construct
  REGION 1..6: note = VL-CDR1_13
QGISNY

SEQ ID NO: 183 - protein, 6 aa, synthetic construct
  REGION 1..6: note = VL-CDR1_14
QDVSTA

SEQ ID NO: 184 - protein, 6 aa, synthetic construct
  REGION 1..6: note = VL-CDR1_15
QNVGTN

SEQ ID NO: 185 - protein, 11 aa, synthetic construct
  REGION 1..11: note = VL-CDR1_16
QSLFHSDGKTY

SEQ ID NO: 186 - protein, 6 aa, synthetic construct
  REGION 1..6: note = VL-CDR1_17
QNINIW

SEQ ID NO: 187 - protein, 11 aa, synthetic construct
  REGION 1..11: note = VL-CDR1_18
QSLLHSDGKTY

SEQ ID NO: 188 - protein, 6 aa, synthetic construct
  REGION 1..6: note = VL-CDR1_19
QDVRTA

SEQ ID NO: 189 - protein, 12 aa, synthetic construct
  REGION 1..12: note = VL-CDR1_20
QSVLYSSNQKNY

SEQ ID NO: 190 - protein, 12 aa, synthetic construct
  REGION 1..12: note = VL-CDR1_21
QSVLYSSSQKNY

SEQ ID NO: 191 - protein, 11 aa, synthetic construct
  REGION 1..11: note = VL-CDR1_22
QSLVHNSGNTY

SEQ ID NO: 192 - protein, 9 aa, synthetic construct
  REGION 1..9: note = VL-CDR1_23
TGAVTTSNY

SEQ ID NO: 193 - protein, 11 aa, synthetic construct
  REGION 1..11: note = VL-CDR1_24
KSLLHTNGITF

SEQ ID NO: 194 - protein, 12 aa, synthetic construct
  REGION 1..12: note = VL-CDR1_25
QSLLNSSNQKNY

SEQ ID NO: 195 - protein, 6 aa, synthetic construct
  REGION 1..6: note = VL-CDR1_26
QNINVW

SEQ ID NO: 196 - protein, 6 aa, synthetic construct
  REGION 1..6: note = VL-CDR1_27
IDIDDD

SEQ ID NO: 197 - protein, 11 aa, synthetic construct
  REGION 1..11: note = VL-CDR1_28
QDIVHSSGNTY

SEQ ID NO: 198 - protein, 11 aa, synthetic construct
  REGION 1..11: note = VL-CDR1_29
KSLLYSNGITY

SEQ ID NO: 199 - protein, 10 aa, synthetic construct
  REGION 1..10: note = VL-CDR1_30
KSVSTSGYSY

SEQ ID NO: 200 - protein, 10 aa, synthetic construct
  REGION 1..10: note = VL-CDR1_31
ESVDSYGNSF

SEQ ID NO: 201 - protein, 11 aa, synthetic construct
  REGION 1..11: note = VL-CDR1_32
QSLLYSNGKTY

SEQ ID NO: 202 - protein, 6 aa, synthetic construct
  REGION 1..6: note = VL-CDR1_33
QGISSN

SEQ ID NO: 203 - protein, 10 aa, synthetic construct
  REGION 1..10: note = VL-CDR1_34
KSVSTSGYSC

SEQ ID NO: 204 - protein, 11 aa, synthetic construct
  REGION 1..11: note = VL-CDR1_35
QSLLYSDGKTY

SEQ ID NO: 205 - protein, 10 aa, synthetic construct
  REGION 1..10: note = VL-CDR1_36
ESVENHVNSF

SEQ ID NO: 206 - protein, 5 aa, synthetic construct
  REGION 1..5: note = VL-CDR1_37
SSVTY

SEQ ID NO: 207 - protein, 10 aa, synthetic construct
  REGION 1..10: note = VL-CDR1_38
ESLDNSGISF

SEQ ID NO: 208 - protein, 6 aa, synthetic construct
  REGION 1..6: note = VL-CDR1_39
QDVSTT

SEQ ID NO: 209 - protein, 6 aa, synthetic construct
  REGION 1..6: note = VL-CDR1_40
QNVGIN

SEQ ID NO: 210 - protein, 11 aa, synthetic construct
  REGION 1..11: note = VL-CDR1_41
QSLLDSDGKTY

SEQ ID NO: 211 - protein, 6 aa, synthetic construct
  REGION 1..6: note = VL-CDR1_42
GNIHNY

SEQ ID NO: 212 - protein, 6 aa, synthetic construct
  REGION 1..6: note = VL-CDR1_43
QSVSSD

SEQ ID NO: 213 - protein, 11 aa, synthetic construct
  REGION 1..11: note = VL-CDR1_44
QSLLYINGKTY

SEQ ID NO: 214 - protein, 11 aa, synthetic construct
  REGION 1..11: note = VL-CDR1_45
RSLLHSNGYTY

SEQ ID NO: 215 - protein, 11 aa, synthetic construct
  REGION 1..11: note = VL-CDR1_46
RSLLDSDGKTY

SEQ ID NO: 216 - protein, 6 aa, synthetic construct
  REGION 1..6: note = VL-CDR1_47
QDVSSV

SEQ ID NO: 217 - protein, 6 aa, synthetic construct
  REGION 1..6: note = VL-CDR1_48
QIINNN

SEQ ID NO: 218 - protein, 10 aa, synthetic construct
  REGION 1..10: note = VL-CDR1_49
KSVTTSAYSY

SEQ ID NO: 219 - protein, 11 aa, synthetic construct
  REGION 1..11: note = VL-CDR1_50
QSLLDRDGKTY

SEQ ID NO: 220 - protein, 6 aa, synthetic construct
  REGION 1..6: note = VL-CDR1_51
QSVSNE

SEQ ID NO: 221 - protein, 7 aa, synthetic construct
  REGION 1..7: note = VL-CDR2_1
LMSTHAS

SEQ ID NO: 222-247 - skipped (26 entries)

SEQ ID NO: 248 - protein, 9 aa, synthetic construct
  REGION 1..9: note = VL-CDR3_1
QQLVDYPLT

SEQ ID NO: 249 - protein, 9 aa, synthetic construct
  REGION 1..9: note = VL-CDR3_2
AQMLEFPLT

SEQ ID NO: 250 - protein, 9 aa, synthetic construct
  REGION 1..9: note = VL-CDR3_3
VQYAQFPPT

SEQ ID NO: 251 - protein, 9 aa, synthetic construct
  REGION 1..9: note = VL-CDR3_4
LQSTHFPLT

SEQ ID NO: 252 - protein, 9 aa, synthetic construct
  REGION 1..9: note = VL-CDR3_5
WQGTHFPLT

SEQ ID NO: 253 - protein, 9 aa, synthetic construct
  REGION 1..9: note = VL-CDR3_6
FQGSHVPLT

SEQ ID NO: 254 - protein, 9 aa, synthetic construct
  REGION 1..9: note = VL-CDR3_7
QQYSQVPYT

SEQ ID NO: 255 - protein, 9 aa, synthetic construct
  REGION 1..9: note = VL-CDR3_8
LQGQSYPLT

SEQ ID NO: 256 - protein, 9 aa, synthetic construct
  REGION 1..9: note = VL-CDR3_9
QQYSKLPYT

SEQ ID NO: 257 - protein, 9 aa, synthetic construct
  REGION 1..9: note = VL-CDR3_10
AQMIEFPLT

SEQ ID NO: 258 - protein, 9 aa, synthetic construct
  REGION 1..9: note = VL-CDR3_11
QQDYTSPYT

SEQ ID NO: 259 - protein, 9 aa, synthetic construct
  REGION 1..9: note = VL-CDR3_12
QQYSELPYT

SEQ ID NO: 260 - protein, 9 aa, synthetic construct
  REGION 1..9: note = VL-CDR3_13
QQHYTTPLT

SEQ ID NO: 261 - protein, 9 aa, synthetic construct
  REGION 1..9: note = VL-CDR3_14
EQYSNFPLT

SEQ ID NO: 262 - protein, 9 aa, synthetic construct
  REGION 1..9: note = VL-CDR3_15
QQYSSYPWT

SEQ ID NO: 263 - protein, 8 aa, synthetic construct
  REGION 1..8: note = VL-CDR3_16
HQYLSSLT

SEQ ID NO: 264 - protein, 9 aa, synthetic construct
  REGION 1..9: note = VL-CDR3_17
SQSTHVPPT

SEQ ID NO: 265 - protein, 9 aa, synthetic construct
  REGION 1..9: note = VL-CDR3_18
ALWYSNHWV

SEQ ID NO: 266 - protein, 9 aa, synthetic construct
  REGION 1..9: note = VL-CDR3_19
AQNLELPWT

SEQ ID NO: 267 - protein, 9 aa, synthetic construct
  REGION 1..9: note = VL-CDR3_20
QQHYSTPYT

SEQ ID NO: 268 - protein, 9 aa, synthetic construct
  REGION 1..9: note = VL-CDR3_21
QQGQSYPYT

SEQ ID NO: 269 - protein, 9 aa, synthetic construct
  REGION 1..9: note = VL-CDR3_22
LQSDNKPLT

SEQ ID NO: 270 - protein, 9 aa, synthetic construct
  REGION 1..9: note = VL-CDR3_23
ALWYSNHLV

SEQ ID NO: 271 - protein, 9 aa, synthetic construct
  REGION 1..9: note = VL-CDR3_24
FQGSHVPPT

SEQ ID NO: 272 - protein, 9 aa, synthetic construct
  REGION 1..9: note = VL-CDR3_25
QHSRELPLT

SEQ ID NO: 273 - protein, 9 aa, synthetic construct
  REGION 1..9: note = VL-CDR3_26
QQNNEDPWT

SEQ ID NO: 274 - protein, 9 aa, synthetic construct
  REGION 1..9: note = VL-CDR3_27
VQGTHFPQT

SEQ ID NO: 275 - protein, 9 aa, synthetic construct
  REGION 1..9: note = VL-CDR3_28
VQYDQFPWT

SEQ ID NO: 276 - protein, 9 aa, synthetic construct
  REGION 1..9: note = VL-CDR3_29
HHSTELPYT

SEQ ID NO: 277 - protein, 8 aa, synthetic construct
  REGION 1..8: note = VL-CDR3_30
VQGTHLPT

SEQ ID NO: 278 - protein, 9 aa, synthetic construct
  REGION 1..9: note = VL-CDR3_31
QQNNEVPYT

SEQ ID NO: 279 - protein, 9 aa, synthetic construct
  REGION 1..9: note = VL-CDR3_32
QQWSSNPLT

SEQ ID NO: 280 - protein, 9 aa, synthetic construct
  REGION 1..9: note = VL-CDR3_33
QHSKEVPWT

SEQ ID NO: 281 - protein, 9 aa, synthetic construct
  REGION 1..9: note = VL-CDR3_34
QQHYSPPFT

SEQ ID NO: 282 - protein, 9 aa, synthetic construct
  REGION 1..9: note = VL-CDR3_35
QQYNSYPYT

SEQ ID NO: 283 - protein, 9 aa, synthetic construct
  REGION 1..9: note = VL-CDR3_36
WQGTHFPFT

SEQ ID NO: 284 - protein, 9 aa, synthetic construct
  REGION 1..9: note = VL-CDR3_37
QHFWSIFPT

SEQ ID NO: 285 - protein, 9 aa, synthetic construct
  REGION 1..9: note = VL-CDR3_38
QHFWSLFPT

SEQ ID NO: 286 - protein, 9 aa, synthetic construct
  REGION 1..9: note = VL-CDR3_39
QHNYISPFT

SEQ ID NO: 287 - protein, 9 aa, synthetic construct
  REGION 1..9: note = VL-CDR3_40
QQHYNTPYT

SEQ ID NO: 288 - protein, 9 aa, synthetic construct
  REGION 1..9: note = VL-CDR3_41
LQSTHFPQT

SEQ ID NO: 289 - protein, 9 aa, synthetic construct
  REGION 1..9: note = VL-CDR3_42
MQHLEYPYT

SEQ ID NO: 290 - protein, 9 aa, synthetic construct
  REGION 1..9: note = VL-CDR3_43
QQYSKLPRT

SEQ ID NO: 291 - protein, 9 aa, synthetic construct
  REGION 1..9: note = VL-CDR3_44
WQGTHFPQT

SEQ ID NO: 292 - protein, 9 aa, synthetic construct
  REGION 1..9: note = VL-CDR3_45
QQGQSSPFT

SEQ ID NO: 293 - protein, 9 aa, synthetic construct
  REGION 1..9: note = VL-CDR3_46
QQTNSWPLT

SEQ ID NO: 294 - protein, 9 aa, synthetic construct
  REGION 1..9: note = VL-CDR3_47
QHNRELPPT

SEQ ID NO: 295 - protein, 8 aa, synthetic construct
  REGION 1..8: note = VL-CDR3_48
WQGTHFPT

SEQ ID NO: 296 - protein, 9 aa, synthetic construct
  REGION 1..9: note = VL-CDR3_49
QQHYSSPWT

SEQ ID NO: 297 - protein, 116 aa, synthetic construct
  REGION 1..116: note = VH-1 Peptide Sequence
QVQLVQSGSELKKPGASVKVSCKASGYTFTNYGMNWVRQAPGQGLKWMGWINTNTGEPTYVEEFTGRFVFSLETSVSTAYLQISSLKAEDTAVYFCAPYDNFFAYWGQGTTVTVSS

SEQ ID NO: 298 - protein, 116 aa, synthetic construct
  REGION 1..116: note = VH-2 Peptide Sequence
QVQLVQSGAEVKKPGASVKVSCKASGYSFTNYYMHWVRQAPGQRLEWMGWIYPGSGNTNYNEKFQGRVTITADTSASTAYMELSSLRSEDTAVYYCSTAPGGFDVWGQGTTVTVSS

SEQ ID NO: 299 - protein, 122 aa, synthetic construct
  REGION 1..122: note = VH-3 Peptide Sequence
QVQLKQSGAELVRPGASVKLSCKASGYTFTDYYINWVKQRPGQGLEWIARIYPGTGNTDYNEKFKGRATLTAEKSSSTAYMQLSSLTSEDSAVYFCARFAYYYGSGGYFDYWGHGTTLTVSS

SEQ ID NO: 300 - protein, 119 aa, synthetic construct
  REGION 1..119: note = VH-4 Peptide Sequence
QIQLVQSGPELKKPGETVKISCKTSGYKFKTYVMSWVKQAPGKALKWMGWINTYSGVPTYADDFKGRFAFSLETSASTAYLEIINLKNEDTATYFCARDGNYGDPMDYWGQGTSVTVSS

SEQ ID NO: 301 - protein, 117 aa, synthetic construct
  REGION 1..117: note = VH-5 Peptide Sequence
QIQLVQSGPELKKPGETVKISCKASGYTFTTYGMGWVKQAPGKDLKWMGWINTYSGVPTYADDFKGRFAFSLETSASTAYLQISNLKNEDTATYFCSTPYEYDGAYWGQGTLVTVSA

SEQ ID NO: 302 - protein, 113 aa, synthetic construct
  REGION 1..113: note = VH-6 Peptide Sequence
EVQLVESGGGLVKPGGSLKLSCAASGFAFSSYAMSWVRQTPEKRLEWVATISDGGVYTYYTDHVKGRFTISRDNAEDNLYLQMSHLKSEDTAMYYCVRDGGYWGQGTTLTVSS

SEQ ID NO: 303 - protein, 116 aa, synthetic construct
  REGION 1..116: note = VH-7 Peptide Sequence
QIQLVQSGPELKKPGETVKISCKASGYTFTTYAMSWVKQAPGKGLKWMGWINTYSGVPTYADDLKGRFAFSLETSASTAYLQINNLKNEDTATYFCARGPYAMDYWGQGTSVTVSS

SEQ ID NO: 304 - protein, 115 aa, synthetic construct
  REGION 1..115: note = VH-8 Peptide Sequence
EVQLQQSGPELVKPGASVKISCKASGYTFTDFYINWVKQSHGKSLEWIGDINPKNGGINYNPKFKIKATLTVDKSSSTSYMDLRGLTSEDSAVYYCTSGYGFPYWGQGTLVTVSA

SEQ ID NO: 305 - protein, 116 aa, synthetic construct
  REGION 1..116: note = VH-9 Peptide Sequence
QIQLVQSGPELKKPGESVKISCKASGYAFTTYGMSWVQQAPGKGLKWMGWVNTYSGVPTCADDFKGRFAFSLETSASTAYLQINNLRNEDTATYFCARGPYAMDYWGQGTSVTVSS

SEQ ID NO: 306 - protein, 120 aa, synthetic construct
  REGION 1..120: note = VH-10 Peptide Sequence
QVQLQQSGPELVKPGASVKISCKASGYTFTDYYINWVKQRPGQGLEWIGWIYPGSNDTKYNEKFKGKATLTVDTSSSTAYMQLGSLTSEDSAVYFCANYFGCSGWFFDVWGTGTTVTVSS

SEQ ID NO: 307 - protein, 113 aa, synthetic construct
  REGION 1..113: note = VH-11 Peptide Sequence
EVQLVESGGGLVKPGGSLKLSCAASGFTFSSYAMSWVRQTPEKRLEWVATISDGGIYTYYPDNVKGRFTISRDNAKNNLFLQMSHLKSEDTAMYYCVRDGGYWGQGTTLTVSS

SEQ ID NO: 308 - protein, 116 aa, synthetic construct
  REGION 1..116: note = VH-12 Peptide Sequence
QIQLVQSGPELKKPGETVKISCKASGYTFTNYGMNWVKQAPGKGLKWMGWINTNTGEPTYVEEFKGRFAFSLETSASTAYLQINNLKNEDTATYFCAPYDNFFAYWGQGTLVTVSA

SEQ ID NO: 309 - protein, 116 aa, synthetic construct
  REGION 1..116: note = VH-13 Peptide Sequence
QVQLQQSGPELVKPGASVKISCKASGYSFTNYYIHWVKQRPGQGLEWIGWIYPGSGNTNYNEKFKGKATLTADTSSSTTNMQLSSLTSEDSAVYYCSTAPGGFDVWGSGTTVTVSS

SEQ ID NO: 310 - protein, 116 aa, synthetic construct
  REGION 1..116: note = VH-14 Peptide Sequence
QVQLVQSGAEVKKPGASVKVSCKASGYSFTNYYMHWVRQAPGQGLEWMGWIYPGSGNTNYNEKFQGRVTMTADTSISTAYMELSRLRSDDTAVYYCSTAPGGFDVWGQGTTVTVSS

SEQ ID NO: 311 - protein, 116 aa, synthetic construct
  REGION 1..116: note = VH-15 Peptide Sequence
QVQLVQSGAEVKKPGASVKVSCKASGYSFTNYYIHWVRQAPGQRLEWMGWIYPGSGNTNYNEKFQGRVTLTADTSASTTYMELSSLRSEDTAVYYCSTAPGGFDVWGQGTTVTVSS

SEQ ID NO: 312 - protein, 119 aa, synthetic construct
  REGION 1..119: note = VH-16 Peptide Sequence
QIQLVQSGPDLKKPGETVKISCKASGYTFTTYVMSWVKQAPGKDLKWMGWINTHSGVPTYADDFKGRFDFSLETSANTAFLQINNLKNEDTATYFCTRDGNDGDAMDNWGQGTSVTVSS

SEQ ID NO: 313 - protein, 120 aa, synthetic construct
  REGION 1..120: note = VH-17 Peptide Sequence
QVQLKQSGPGLVQPSQSLSITCTVSGFSLTSYGVHWVRQPPGKGLEWLGVIWSGGSTDYNAAFISRLSISKDNSKSQVFFKMNSLQADDTAIYYCAKGPYDYDLGWFAYWGQGTLVTVSA

SEQ ID NO: 314 - protein, 116 aa, synthetic construct
  REGION 1..116: note = VH-18 Peptide Sequence
QIQLVQSGPELKKPGETVKISCKASGYTFTTYGMSWVKQAPGKGLKWMAWINTYSGVPTYADDFKGRFAFSLETSASTAYLQINNLTNEDTATYFCARGPYAMDYWGQGTSVTVSS

SEQ ID NO: 315 - protein, 115 aa, synthetic construct
  REGION 1..115: note = VH-19 Peptide Sequence
QVQLQQPGAELVGPGSSVKLSCKASGYTFTNYWIHWVKQRPLQGLEWIGNIDPSDSETHYNQKFKDKATLTVDKSSSTAYMQLSSLTSEDSAVYYCARHGYYDYWGQGTTLTVSS

SEQ ID NO: 316 - protein, 119 aa, synthetic construct
  REGION 1..119: note = VH-20 Peptide Sequence
QVQLQQPGAELVKPGASVKLSCKASGYTFTSYWMHWVKQRPGQGLEWIGMIHPNSGSTDYNEKFKNKATLNVDKSSSTAYIQLSSLTSEDSAVYYCTRWGIYYYARDYWGQGTTLTVSS

SEQ ID NO: 317 - protein, 117 aa, synthetic construct
  REGION 1..117: note = VH-21 Peptide Sequence
QIQLVQSGPELKKPGETVKISCKASGYTFTTYGMSWVKQAPGKGLKWMGWINTYSGVPTYADDFKGRFAFSLETSASTAYLQINNLKNEDTATYFCAVPYEYDGAYWGQGTLVTVSA

SEQ ID NO: 318 - protein, 115 aa, synthetic construct
  REGION 1..115: note = VH-22 Peptide Sequence
EVQLQQSGPELVKPGASVKISCKASGYTFTDYYMNWVKQSHGKSLEWIGDINPNNGGTNYNQKFKGKATLTVDKSSSTAYMELRSLTSEDSAVYYCTSGYGFPYWGQGTLVTVSA

SEQ ID NO: 319 - protein, 117 aa, synthetic construct
  REGION 1..117: note = VH-23 Peptide Sequence
QIQLVQSGPELKKPGETVKISCKASGYTFTTYGMGWVKQAPGKGLKWMGWINTYSGVPTYADDFKGRFAFSLETSTSTAYLQINNLKNEDMATYFCATPYEYDGAYWGQGTLVTVSA

SEQ ID NO: 320 - protein, 112 aa, synthetic construct
  REGION 1..112: note = VH-24 Peptide Sequence
QVQLQQSGPELVKPGDSVKISCKAAGYTFSDYYINWVKQRPGQGLEWIGWIYPVSVNTKYNEKFKGKATLTVDTSSSTAYMQLSSLTSEDSGVYFCAYLDYWGQGTLVTVSA

SEQ ID NO: 321 - protein, 120 aa, synthetic construct
  REGION 1..120: note = VH-25 Peptide Sequence
QVQLKQSGPGLVQPSQSLSITCTVSGFSLTSYGVHWVRQAPGKGLEWLGVIWSGGSTDYNAAFMSRLSISKDNSKSQVFFKMNSLQADDTAIYYCAKSPDGYDVAWFGYWGQGTLVTVSA

SEQ ID NO: 322 - protein, 122 aa, synthetic construct
  REGION 1..122: note = VH-26 Peptide Sequence
QIQLVQSGPELKKPGETVKISCKASGYTFTNYGMNWVKQAPGKGLKWMGWINTYTGEPSYADDFKGRFAFSLETSASTAYLQINNLKNEDMATYFCARWGGYAGDYYAMDFWGQGTSVTVSS

SEQ ID NO: 323 - protein, 122 aa, synthetic construct
  REGION 1..122: note = VH-27 Peptide Sequence
QIQLVQSGPELKKPGETVKISCKASGYTFTNYGMNWVKQAPGKGLKWMGWINTYTGEPSYADDFKGRFAFSLETSASTAYLQINNLKNEDMATYFCARWGGYDGDYYAMDYWGQGTSVTVSS

SEQ ID NO: 324 - protein, 122 aa, synthetic construct
  REGION 1..122: note = VH-28 Peptide Sequence
QIQLVQSGPELKKPGETVKISCKASGYTFTNFGMNWVKQAPGKGLKWMGWINTYTGEPSYADDFKGRFAFSLETSASTAYLQINNLKNEDIATYFCARWGGYAGDYYAMDYWGQGTSVTVSS

SEQ ID NO: 325 - protein, 116 aa, synthetic construct
  REGION 1..116: note = VH-29 Peptide Sequence
EVQLLESGGGLVKPGGSLKLSCAASGFTFSSYAMSWVRQTPEKRLEWVASISSGGDTYYPDSVKGRFTISRDNARNILYLQMSSLRSEDTAMYYCASYGNSLFDYWGQGTTLTVSS

SEQ ID NO: 326 - protein, 114 aa, synthetic construct
  REGION 1..114: note = VH-30 Peptide Sequence
QIQLVQSGPELKKPGETVKISCKASGYTFTNYGMNWVKQAPGKGLKWMGWINTYTGEPTYAGDLKGRFAFSLETSASTAYLQINNLKNEDTATYFCVRYTMDYWGQGTSVTVSS

SEQ ID NO: 327 - protein, 124 aa, synthetic construct
  REGION 1..124: note = VH-31 Peptide Sequence
QVTLKESGPGILQPSQTLSLTCSFSGFSLSTSGMGVGWIRQPSGKGLEWLAHIWWDDDKYYNTALKSGLTISKDASKNQVFLKIASMDTADTATYYCARNLYDGSYGYYAMDYWGQGTSVTVSS

SEQ ID NO: 328 - protein, 122 aa, synthetic construct
  REGION 1..122: note = VH-32 Peptide Sequence
QIQLVQSGPELKKPGETVKISCKASGYTFTNYGMNWVKQAPGKGLKWMGWINTYTGEPAYADDFKGRFAFSLETSASTAYLQINNLKNEDMATYFCARWGGYDGDYYAMDYWGQGTSVTVSS

SEQ ID NO: 329 - protein, 123 aa, synthetic construct
  REGION 1..123: note = VH-33 Peptide Sequence
EVQLVESGGDLVKPGGSLKLSCAASGFTFSNYGLSWIRQTPDKRLEWVATISSGGSYTYYPDSVKGRFTISRDSAKNTLYLQMSSLKSEDTAMYYCARHAHYYGVSPYYFDYWGQGTCLTVSS

SEQ ID NO: 330 - protein, 119 aa, synthetic construct
  REGION 1..119: note = VH-34 Peptide Sequence
QIQLVQSGPEVKKPGETVKISCKASGYIFTNYGMNWVKQAPGKGLKWMGWINTYTGEPTYTDDFKGRFAFSLETSASTAYLQINNLKNEDTATYFCAKFGNYVGAMDYWGQGTSVTVSS

SEQ ID NO: 331 - protein, 120 aa, synthetic construct
  REGION 1..120: note = VH-35 Peptide Sequence
EVQLQQSGPELVKPGASVKISCKASGNTFTDHNMHWVKQSHGKSLEWIGYIYPYNGGTGYNQKFKSKATLTVDNSSSTVYMELRSLTSEDSAVYYCARGEYDYLAWFAYWGQGTLVTVSA

SEQ ID NO: 332 - protein, 119 aa, synthetic construct
  REGION 1..119: note = VH-36 Peptide Sequence
QIQLVQSGPELKKPGETVKISCKASGYTFTNYGMNWVKQAPGKGLKWMGWINTYTGEPTYVDDFKGRFAFSLETSASTAYLRINNLKNEDTATYFCAKFGNYVGAMDYWGQGTSVTVSS

SEQ ID NO: 333 - protein, 117 aa, synthetic construct
  REGION 1..117: note = VH-37 Peptide Sequence
EVQLVETGGGLVKPGGSLKLSCAASGFTFSSYAMSWVRQTPEKRLEWVASISSGGSTYYPDSVKGRFTISRDNARNILYLQMSSLRSEDTAMYYCTRFTTVVEMDYWGQGTSVTVSS

SEQ ID NO: 334 - protein, 112 aa, synthetic construct
  REGION 1..112: note = VH-38 Peptide Sequence
QVQLQQTGAELVKPGASVKLSCKASGYTFTSYWINWVKQRPGQGLEWIGNIYPGSSSIYYSEKFKSKATLTVDTSSSTAYMQLSSLTSDDSAVYYCARWGYWGQGTTLTVSS

SEQ ID NO: 335 - protein, 121 aa, synthetic construct
  REGION 1..121: note = VH-39 Peptide Sequence
QVTLKESGPGILQPSQTLSLTCSFSGFSLSTFGMGVGWIRQPSGKGLEWLAHIWWDDDKHYNPALKSRLTISKDTSKNQVFLRIANVDTADNATYYCARIDYGDYVGFAYWGQGTLVTVSA

SEQ ID NO: 336 - protein, 118 aa, synthetic construct
  REGION 1..118: note = VH-40 Peptide Sequence
QVQLQQSGPELVRPGALVKISCKASGYTFTSYDINWVKQRPGQGLEWIGWIYPGDGSTKYNEKFKGKATLTADKSSSTAYMQLSSLTSENSAVYFCAREAASNAMDYWGQGTSVTVSS

SEQ ID NO: 337 - protein, 122 aa, synthetic construct
  REGION 1..122: note = VH-41 Peptide Sequence
EVKLEESGGGLVQPGGSMKLSCVASGFTFSNYWMNWVRQSPEKGLEWVAEIRLKSNNYATHYAESVKGRFTISRDDSKSSVYLQMNNLRAEDTGIYYCTRHYGFPYWYFDVWGAGTTVTVSS

SEQ ID NO: 338 - protein, 118 aa, synthetic construct
  REGION 1..118: note = VH-42 Peptide Sequence
QIQLVQSGPELKKPGETVKISCKASGYTFTNYGMNWVKQAPGKGLKWMGWINTNTGEPTYAEEFKGRFAFSLETSASTAYLQINNLKNEDTATYFCATGGGNWDFDYWGQGTTLTVSS

SEQ ID NO: 339 - protein, 114 aa, synthetic construct
  REGION 1..114: note = VH-43 Peptide Sequence
QIQLVQSGPELTKPGETVKISCKASGYTFTDYGMNWVRQAPGETLKWMGWINTYTGEPTYADDFKGRFAFSLESSASTAYLQINNLKNEDVATYFCARYPMDYWGQGTSVTVSS

SEQ ID NO: 340 - protein, 122 aa, synthetic construct
  REGION 1..122: note = VH-44 Peptide Sequence
EVKLEESGGGLVQPGGSMKLSCVASGFTFSNYWMNWVRQSPEKGLEWVAELRLKSNNYATHYAESVKGRFTISRDDSKSSVYLQMNNLRAEDTGIYYCTRHYGFPYWYFDVWGAGTTVTVSS

SEQ ID NO: 341 - protein, 118 aa, synthetic construct
  REGION 1..118: note = VH-45 Peptide Sequence
EVQLQQSGPELVKPGASVKMSCKASGYTFTSYVMHWVKQKPGQGLEWIGYINPYNDGTKYNEKFKGKATLTSDKSSSTAYMELSSLTSEDSAVYYCARLLFYYAMDYWGQGTSVTVSS

SEQ ID NO: 342 - protein, 118 aa, synthetic construct
  REGION 1..118: note = VH-46 Peptide Sequence
QVQLQQSGPELVRPGALVKISCKASGYTFTSYDINWVKQRPGQGLEWIGWIYPGDGSTKYNEKFKGKATLTADKSSSTVYMQLSSLTSENSAVYFCAREAASNAMDYWGQGTSVTVSS

SEQ ID NO: 343 - protein, 118 aa, synthetic construct
  REGION 1..118: note = VH-47 Peptide Sequence
QVQLQQSGPELVKPGALVKISCKASGYTFTSYDINWVKQRPGQGLEWIGWIYPGDGSTKYNEKFKGKAALTADKSSSTAYMQLSSLTSENSAVYFCAREAASNAMDYWGQGTSVTVSS

SEQ ID NO: 344 - protein, 118 aa, synthetic construct
  REGION 1..118: note = VH-48 Peptide Sequence
EVQLQQSGPELVKPGASVKMSCKASGYSFTNYIMHWVKQKPGQGLEWIGYINPYNDGTKYNEKFKGKATLTSDKSSSTAYMELSSLTSEDSAVYYCARLLFYYAMDYWGQGTSVTVSS

SEQ ID NO: 345 - protein, 118 aa, synthetic construct
  REGION 1..118: note = VH-49 Peptide Sequence
QVQLQQSGAELVKPGASVKLSCKASGYTFRSYDINWVRQRPEQGLEWIGWIFPGEGISKYNEKFKGKATLTTDKLSSTAYMQLSSLTSEDSAVYFCAREATAGAMDYWGQGTSVTVSS

SEQ ID NO: 346 - protein, 122 aa, synthetic construct
  REGION 1..122: note = VH-50 Peptide Sequence
EVKLLESGGGLVQPGGSMKLSCVASGFTFSNFWMNWVRQSPEKGLEWVAEIRLKSNNYATHYAESVKGRFTISRDDSKSSVYLQMNNLRAEDTGIYYCTRHYGFPYWYFDVWGAGTTVTVSS

SEQ ID NO: 347 - protein, 118 aa, synthetic construct
  REGION 1..118: note = VH-51 Peptide Sequence
QIQLQQSGAELVKPGASVKLSCKASGYTFTSYDICWVRQRPEQGLEWIGWIFPGDGTTKYTENFKGKATLTTDKSSSTAYMHLSRLTSEDSAVYFCAREGAGSWFAYWGQGTLVTVSA

SEQ ID NO: 348 - protein, 114 aa, synthetic construct
  REGION 1..114: note = VH-52 Peptide Sequence
EVQLQQSGAELVRPGTSVKVSCKASEYAFNNYMMEWVKQRPGQGLEWIGVINPGSGATNYNENFKDKATLTADKSSTTAYMQLSSLTSDDSAVYFCTYNDLGYWGQGTLVTVSA

SEQ ID NO: 349 - protein, 123 aa, synthetic construct
  REGION 1..123: note = VH-53 Peptide Sequence
EVKLQQSGPELMKPGTSMKISCKASGYSFTGYTMNWVKQSHGKNLEWIGLINPYNGGTNYNQKFRGKATLSVDKSSNTAYMELLSLTSEDSAVYYCARKDDYYGSSPYALDYWGQGTSVTVSS

SEQ ID NO: 350 - protein, 116 aa, synthetic construct
  REGION 1..116: note = VH-54 Peptide Sequence
QVQLQQSGAELMKPGASVKISCKATGYTFTNYWIEWVKQRPGHGLEWIGEFLPGDGSSHYNEKFKGKATFTSDTSSNTAYIHLTSLTSEDSAVYYCVRDDYDSDYWAQGTTLTVSS

SEQ ID NO: 351 - protein, 120 aa, synthetic construct
  REGION 1..120: note = VH-55 Peptide Sequence
QVQMKQSGPGLVQPSQSLSITCTVSGFSLINYGVHWVRQSPGKGLEWLGVIWSGGSTDYNAAFISRLSISKDNSKSQVFFKMNSLQADDTAIYYCARIYYYGRGYAMDYWGQGTSVTVSS

SEQ ID NO: 352 - protein, 122 aa, synthetic construct
  REGION 1..122: note = VH-56 Peptide Sequence
EVQLQQSGAEVVKPGAPVKLSCKASGYTFNNYWLNWVKQRPGRGLEWIGRIDPSDSETHYNQKFKDKATLTVDMSSSTAYIQLSSLTSEDSAVYYCARGDYYYGTRGPMDYWGQGTSVTVSS

SEQ ID NO: 353 - protein, 115 aa, synthetic construct
  REGION 1..115: note = VH-57 Peptide Sequence
QVQLQQSGAELVRPGASVNLSCKASGYTFTNYWMNWVKQRPGQGLEWVGMIDPSDSETHYNQMFKDKATLTIDKSSSIAYMQLSSLTSEDSAVYYCARWGAMDYWGQGTSVTVSS

SEQ ID NO: 354 - protein, 121 aa, synthetic construct
  REGION 1..121: note = VH-58 Peptide Sequence
QVQLKQSGPGLVAPSQSLSITCTVSGFSLTSYGVHWVRQPPGKGLEWLGIIWAGGSTNYNPALMSRLSISKDKSKSQVFLKMNSLKTDDTAMYYCARDRASLLRPGAMDYWGQGTSVTVSS

SEQ ID NO: 355 - protein, 118 aa, synthetic construct
  REGION 1..118: note = VH-59 Peptide Sequence
QIQLVQSGPELKKPGETVKISCKASGYTFTNYGMNWVKQAPGKGLKWMGWINTNTGEPTYAEEFKGRFAFSLETSASTAYLQINYLKNEDTATFFCARLDYDYDEDYWGQGTTLTVSS

SEQ ID NO: 356 - protein, 120 aa, synthetic construct
  REGION 1..120: note = VH-60 Peptide Sequence
QVQLVETGPGLVAPSQSLSITCTVSGFSLTSYGVHWIRQSPGKGLEWLGTIWAGGSTDYNSPLMSRLSISKDNSKNQVFLKMNSLQIDDTAIYYCASPPSGYDYDVFASWGQGTLVTVSA

SEQ ID NO: 357 - protein, 120 aa, synthetic construct
  REGION 1..120: note = VH-61 Peptide Sequence
QVQLKQSGPGLVQPSQSLSITCTVSGFSLINYGVHWVRQSPGKGLEWLGVIWSGGSTDYNAAFISRLSISKDNSKSQVFFKMNSLQADDTAIYYCARIYYYGRGYAMDYWGQGTSVTVSS

SEQ ID NO: 358 - protein, 120 aa, synthetic construct
  REGION 1..120: note = VH-62 Peptide Sequence
QVQLKESGPGLVAPSQSLSITCTVSGFSLTSYGVHWIRQPPGKGLEWLGGIWAGGSTDYNSPLMSRLSITKDNSKSQVFLKMNSLQSDDTAMYYCASPPSGYDYDVFAYWGQGTLVTVSA

SEQ ID NO: 359 - protein, 120 aa, synthetic construct
  REGION 1..120: note = VH-63 Peptide Sequence
QVQLKESGPVLVAPSQSLSITCTVSGFSLSSYGVHWVRQPPGKGLEWLGVIWAGGSTDYDSALMSRLSISKDNSKSQVFLKMDSLQTDDTAMYYCAKPPYDYDGAWFAYWGQGTLVTVSA

SEQ ID NO: 360 - protein, 114 aa, synthetic construct
  REGION 1..114: note = VH-64 Peptide Sequence
QVQLQQSGPQLVRPGASVKISCKASGYSFTNYWMHWVKQRPGQGLEWIGMIDPSDSETRLNQKFKDKATLTVDKSSSTAYMQLSSPTSEDSAVYYCATGRPDYWGQGTTLTVSS

SEQ ID NO: 361 - protein, 114 aa, synthetic construct
  REGION 1..114: note = VH-65 Peptide Sequence
QVQLQQSGPQLVRPGASVKISCKASGYSFTSYWMHWVKQRPGQGLEWIGMIDPSDSETRLNQKFKDKATLTVDKSSSTAYMQLSSPTSEDSIVYYCAKGRPDYWGQGTTLTVSS

SEQ ID NO: 362 - protein, 118 aa, synthetic construct
  REGION 1..118: note = VH-66 Peptide Sequence
DGKLQESGPGLVKPSQSLSLTCSVTGYSITSGYYWNWIRQFPGNKLEWMGHISYDGRNNYNPSLKNRISITRDTSKNQFFLKLNSVTTEDTATYYCAGYDFLWYFDVWGTGTTVTVSS

SEQ ID NO: 363 - protein, 121 aa, synthetic construct
  REGION 1..121: note = VH-67 Peptide Sequence
QVQLKESGPGILQPSQTLSLTCSFSGFSLSTFGMGVGWIRQPSGKGLEWLAHIWWDDDKHYNPALKSRLTISKDTSKNQVFLRIANVDTADNATYYCARIDYGDYVGFAYWGQGTLVTVSA

SEQ ID NO: 364 - protein, 118 aa, synthetic construct
  REGION 1..118: note = VH-68 Peptide Sequence
DGQLQESGPGLVKPSQSLSLTCSVTGYSITSGYYWNWIRQFPGNKLEWMGHISYDGRNNYNPSLKNRISITRDTSKNQFFLKLNSVTTEDTATYYCAGYDFLWYFDVWGTGTTVTVSS

SEQ ID NO: 365 - protein, 119 aa, synthetic construct
  REGION 1..119: note = VH-69 Peptide Sequence
EVQLQQSGAELVKSGASVKLSCTASGFNIKDYYMHWVKQRTEQGLEWIGRIYPEDDETKYAPKFQGKATITADTSSNTAYLQLSSLTSEDTAVYYCARSGGYYVWFAYWGQGTLVTVSA

SEQ ID NO: 366 - protein, 121 aa, synthetic construct
  REGION 1..121: note = VH-70 Peptide Sequence
EVQLQQSGPELVKPGSSVKISCKASRYTFTDYNMDWVKQSHGKRLEWIGYIYPNNGGTGYNQKFKGKATLTVDKSSSTAYMELRSLTSEDSAVYYCARSYYDGSYDAMDYWGQGTSVTVSS

SEQ ID NO: 367 - protein, 114 aa, synthetic construct
  REGION 1..114: note = VH-71 Peptide Sequence
QIQLVQSGPELKKPGETVKISCKASGYTFTIFGMNWVKQAPGKGLKWMGWVNTYTGEPTYADDFKGRFAFSLETSASTAYLQINNLKNEDTATYFCARGWFAYWGQGTLVTVSA

SEQ ID NO: 368 - protein, 120 aa, synthetic construct
  REGION 1..120: note = VH-72 Peptide Sequence
QVQLKESGPVLVAPSQSLSITCTVSGFSLTSYGIHWVRQPPGKGLEWLGVIWAGGSTNYNSALMSRLSISKDNSKSQVFLKMNSLQIDDTAMYYCAKPPHDYDQAWFAYWGQGTLITVSA

SEQ ID NO: 369 - protein, 116 aa, synthetic construct
  REGION 1..116: note = VH-73 Peptide Sequence
QVQLQQSGAELVRPGASVKLSCKASGYTFTSSWMNWVKQRPGQGLDWIGMIDPSDSETHYNQMFKDKATLTVDKSSNTAYMQLSRLTSEDSAVYYCVNSNYESGYWGQGTTLTVSS

SEQ ID NO: 370 - protein, 116 aa, synthetic construct
  REGION 1..116: note = VH-74 Peptide Sequence
QVQLQQSGAELVRPGASVKLSCKASGYTFTGYWLNWVKQRPGQGLEWIGMIDPSDSETHYNQVFKDKATMTVDRSSSTAYMQLSGLTSEDSAVYYCANSNYASGSWGQGTTLTVSS

SEQ ID NO: 371 - protein, 120 aa, synthetic construct
  REGION 1..120: note = VH-75 Peptide Sequence
EVQLQQSGPELVKPGASVKVSCKASGYSFTDYNMYWVMQSHGKSLEWIGYIDPYNDATSYSQKFTGKATLTVDKSSSTAFMHLNSLTSEDSAVYYCARWGRYEYYAMDYWGQGTSVTVSS

SEQ ID NO: 372 - protein, 115 aa, synthetic construct
  REGION 1..115: note = VH-76 Peptide Sequence
QVQLKESGPDLVQPSQTLSLTCTVSGFSLTIYGVHWVRQPPGKGLEWVGTVAWDDKKYYNSPLQSRLSISRDTSKNQVFLKLSSLQTEDTAMYYCTMTGGPINYWGPGTSVTVSS

SEQ ID NO: 373 - protein, 117 aa, synthetic construct
  REGION 1..117: note = VH-77 Peptide Sequence
EVQLVESGGGLVKPGGSLKLSCAASGFTFSSYAMSWVRQTPEKRLEWVASISSGDSPYYPDSVKGRFTISRDNARNILYLQMSSLRSEDTAMYYCTRFTTVVEMDYWGQGTSVTVSS

SEQ ID NO: 374 - protein, 112 aa, synthetic construct
  REGION 1..112: note = VL-1 Peptide Sequence
DIVLTQSPLSLPVTPGEPASISCRSSKSLLYKDGKTYLNWFLQKPGQSPQLLIYLMSTHASGVPDRFSGSGSGTDFTLKISRVEAEDVGVYYCQQLVDYPLTFGGGTKLEIK

SEQ ID NO: 375 - protein, 112 aa, synthetic construct
  REGION 1..112: note = VL-2 Peptide Sequence
DIVMTQTPLSLSVTPGQPASISCKSSKSLLHSDGITYLYWYLQKPGQSPQLLIYRMSNLASGVPDRFSGSGSGTDFTLKISRVEAEDVGVYYCAQMLEFPLTFGQGTKLEIK

SEQ ID NO: 376 - protein, 107 aa, synthetic construct
  REGION 1..107: note = VL-3 Peptide Sequence
DILMTQSPSSMSVSLGDTVSITCHASQGINSNMGWLQQKPGKSFKGLIYHATNLEDGVPSRFSGSGSGADYSLTISSLESEDFADYYCVQYAQFPPTFGSGTKLEIK

SEQ ID NO: 377 - protein, 112 aa, synthetic construct
  REGION 1..112: note = VL-4 Peptide Sequence
DVVMTQTPLTLSVAIGQPASISCKSSQSLLYTNGKTYLNWLLQRPGQSPKRLIYLLSKLDSGVPDRFSASGSGTDFTLKISRVEAEDLGVYYCLQSTHFPLTFGAGTKLEMK

SEQ ID NO: 378 - protein, 112 aa, synthetic construct
  REGION 1..112: note = VL-5 Peptide Sequence
DVVMTQTPLTLSVTIGQPASISCKSSQSLFDSDGKTYLNWLLQRPGQSPKRLIYLVSKLDSGVPDRFTGSGSGTDFTLKISRVEAEDLGVYYCWQGTHFPLTFGAGTKLEMK

SEQ ID NO: 379 - protein, 112 aa, synthetic construct
  REGION 1..112: note = VL-6 Peptide Sequence
DVLMTQTPLSLPVSLGDQASISCRSSQSIVHNNGNTYLEWYLQKPGQSPKLLIYKVSNRFSGVPDRFSGSGSGTDFTLKISRVEAEDLGVYYCFQGSHVPLTFGGGTKLELK

SEQ ID NO: 380 - protein, 107 aa, synthetic construct
  REGION 1..107: note = VL-7 Peptide Sequence
DIQMTQTTSSLSASLGDRVTISCSASQGINNYLNWYQQKPDGTVKLLIYYASSLHSGVPSRFSGSGSGTDYSLTISNLEPEDIATYYCQQYSQVPYTFGSGTKLEIK

SEQ ID NO: 381 - protein, 107 aa, synthetic construct
  REGION 1..107: note = VL-8 Peptide Sequence
DIQMNQSPSSLSASLGDTITITCRASQNIYIWLSWYQQKPGNIPKLLIYKASNLHTGVPSRFSGSGSGTDFTLTISTLQPEDIATYFCLQGQSYPLTFGAGTKLEMK

SEQ ID NO: 382 - protein, 107 aa, synthetic construct
  REGION 1..107: note = VL-9 Peptide Sequence
DIQMTQTTSSLSASLGDRVTINCSASQDISNYLNWYQQKPDGTVKLLIYYTSSLLSGVPSRFSGSGSGTDYSLTISNLEPEDIATYFCQQYSKLPYTFGSGTHLEIK

SEQ ID NO: 383 - protein, 112 aa, synthetic construct
  REGION 1..112: note = VL-10 Peptide Sequence
DIVMTQAAFSNPVTLGTSASISCRSSKSLLHSDGITYLYWYLQRPGQSPQLLIYRMSNLASGVPDRFSGSGSGTDFTLRISRVEAEDVGVYYCAQMIEFPLTFGAGTILELK

SEQ ID NO: 384 - protein, 112 aa, synthetic construct
  REGION 1..112: note = VL-11 Peptide Sequence
DVVMTQTPLTLSVAIGQPASISCKSSQSLLYTNGKTYLNWLLQRPGQSPKRLIYLVSKLDSGVPDRFSGSGSGTDFTLKISRVEAEDLGVYYCLQSTHFPLTFGAGTKLELK

SEQ ID NO: 385 - protein, 112 aa, synthetic construct
  REGION 1..112: note = VL-12 Peptide Sequence
DVLMTQTPLSLPVSLGDQASISCRSSQSIVHSNGNTYLEWYLQKPGQSPKLLIYKVSNRFSGVPDRFSGSGSGTDFTLKISRVEAEDLGVYYCFQGSHVPLTFGAGTKLELK

SEQ ID NO: 386 - protein, 112 aa, synthetic construct
  REGION 1..112: note = VL-13 Peptide Sequence
DIVITQDELSNPVTSGESVSISCRSSKSLLYKDGKTYLNWFLQRPGQSPQLLIYLMSTHASGVSDRFSGSGSGTDFTLEISRVKAEDVGVYYCQQLVDYPLTFGAGTKLELK

SEQ ID NO: 387 - protein, 112 aa, synthetic construct
  REGION 1..112: note = VL-14 Peptide Sequence
DIVMTQAAFSNPVTLGTSASISCRSSKSLLHSDGITYLYWYLQRPGQSPQLLIYRMSNLASGVPDRFSGSGSGTDFTLRISRVEAEDVGVYYCAQMLEFPLTFGAGTKLELK

SEQ ID NO: 388 - protein, 112 aa, synthetic construct
  REGION 1..112: note = VL-15 Peptide Sequence
DIVMTQSPLSLPVTPGEPASISCRSSKSLLHSDGITYLYWYLQKPGQSPQLLIYRMSNLASGVPDRFSGSGSGTDFTLKISRVEAEDVGVYYCAQMLEFPLTFGQGTKLEIK

SEQ ID NO: 389 - protein, 113 aa, synthetic construct
  REGION 1..113: note = VL-16 Peptide Sequence
DVVMTQTPLTLSVTIGQPASISCKSSQSLLYTDGKTYLSWFLQRPGQSPKRLIYLVSKLDSGVPDRFSGSGSGTDFTLKISRVEAEDLGVYYCLQSTHFPLTFGAGTKLEVKR

SEQ ID NO: 390 - protein, 108 aa, synthetic construct
  REGION 1..108: note = VL-17 Peptide Sequence
SIVMTQTPKFLLVSAGDRVTITCKASQSVSNDVAWYQQKPGQSPKLLIYYASNRYTGVPDRFTGSGYGTDFTFTISTVQAEDLAVYFCQQDYTSPYTFGGGTKLEIKR

SEQ ID NO: 391 - protein, 108 aa, synthetic construct
  REGION 1..108: note = VL-18 Peptide Sequence
DIQMTQTTSSLSASLGDRVTISCSASQGISNYLNWYQQKPDGTVKLLIYYTSSLHSGVPSRFSGSGSGTDYSLTISNLEPEDIATYYCQQYSELPYTFGSGTKLEIKR

SEQ ID NO: 392 - protein, 108 aa, synthetic construct
  REGION 1..108: note = VL-19 Peptide Sequence
DIVMTQSHKFMSTSVGDRVSITCKASQDVSTAVAWYQQKPGQSPKLLIYWASTRHTGVPDRFTGSGSGTDYTLTISSVQAEDLALYYCQQHYTTPLTFGAGTKLELKR

SEQ ID NO: 393 - protein, 108 aa, synthetic construct
  REGION 1..108: note = VL-20 Peptide Sequence
DIVMTQSQKFMSTSVGERVSITCKASQNVGTNVAWYQQKAGQSLELLIYGASNRHTGVPDRFTGSGSGTDFTLTITNVQSEDMTNYFCEQYSNFPLTFGAGTKLELKR

SEQ ID NO: 394 - protein, 113 aa, synthetic construct
  REGION 1..113: note = VL-21 Peptide Sequence
DVVMTQTPLTLSVTIGQPASISCKSSQSLFHSDGKTYLNWLLQRPGQSPKRLIYLVSKLDSGVPDRFTGSGSGTDFTPKISRVEDEDLGVYYCWQGTHFPLTFGAGTKLEMKR

SEQ ID NO: 395 - protein, 108 aa, synthetic construct
  REGION 1..108: note = VL-22 Peptide Sequence
DIQMNQSPSSLSASLGDTISITCRASQNINIWLSWYQQKPGNIPQLLIYKASNLHTGVPSRFSGSGSGTDFTLTISSLQPEDIATYYCLQGQSYPLTFGAGTKLVMKR

SEQ ID NO: 396 - protein, 111 aa, synthetic construct
  REGION 1..111: note = VL-23 Peptide Sequence
DVVMTQTPLTLSVTIGQPASISCKSSQSLLHSDGKTYLNWLLQRPGQPPKRLMYLVSTLDSGVPDRFTGSGSGTDFTLKISRVEAEDLGVYYCWQGTHFPLTFGAGTKPER

SEQ ID NO: 397 - protein, 111 aa, synthetic construct
  REGION 1..111: note = VL-24 Peptide Sequence
DIVMTQAAFSNPVTLGTSASISCRSSKSLLHSDGITYFYWYLQRPGQSPQLLIYRMSNLASGVPDRFSGSGSGTDFTLRISRVEAEDVGVYYCAQMLEFPLTFGAGTKLER

SEQ ID NO: 398 - protein, 108 aa, synthetic construct
  REGION 1..108: note = VL-25 Peptide Sequence
DIVMTQSHKFMSTSVGDRVSITCKASQDVRTAVAWYQQKPGQSPKLLIYWASTRHTGVPDRFTGSGSGTDFTLTLSNVQSEDLADYFCQQYSSYPWTFGGGTKLEIKR

SEQ ID NO: 399 - protein, 112 aa, synthetic construct
  REGION 1..112: note = VL-26 Peptide Sequence
NIWLTQSPSSLAVSAGEMVTMTCKSSQSVLYSSNQKNYLAWYQQKPGQSPKLLIYWASTRESGVPDRFTGSGSGTDFSLTISSVQAEDLAVYYCHQYLSSLTFGAGTKLELK

SEQ ID NO: 400 - protein, 112 aa, synthetic construct
  REGION 1..112: note = VL-27 Peptide Sequence
NIMMTQSPSSLAVSAGEKVTMSCKSSQSVLYSSNQKNYLAWYQQKPGQSPKLLIYWASTRESGVPDRFTGSGSGTDFTLTISSVQPEDLAVYYCHQYLSSLTFGAGTKLELK

SEQ ID NO: 401 - protein, 112 aa, synthetic construct
  REGION 1..112: note = VL-28 Peptide Sequence
NIMMTQSPSSLAVSAGQKVTMSCKSSQSVLYSSSQKNYLAWYQQKPGQSPKLLIYWASTRESGVPDRFSGSGSGTDFTLTISSVQPEDLAVYYCHQYLSSLTFGAGTKLELK

SEQ ID NO: 402 - protein, 112 aa, synthetic construct
  REGION 1..112: note = VL-29 Peptide Sequence
DVVMTQTPLSLPVSLGDQASISCRSSQSLVHNSGNTYLHWYLQRPGQSPNLLIYKVSNRFSGVPDRFSGSGSGTDFTLKISRVAAEDLGVYFCSQSTHVPPTFGGGTKLEIK

SEQ ID NO: 403 - protein, 109 aa, synthetic construct
  REGION 1..109: note = VL-30 Peptide Sequence
QAVVTQESALTTSPGETVTLTCRSSTGAVTTSNYANWVQEKPDHLFTGLIGGINNRVPGVPARFSGSLIGDKAALTITGAQTEDEAIYFCALWYSNHWVFGGGTKLTVL

SEQ ID NO: 404 - protein, 112 aa, synthetic construct
  REGION 1..112: note = VL-31 Peptide Sequence
DIVMTQAAFSNPVTLGTSASISCRSSKSLLHTNGITFLYWYLQKPGQSPQPLIYQMSNLASGVPDRFSSSGSGTDFTLRISRVEAEDVGVYYCAQNLELPWTFGGGTKLEIN

SEQ ID NO: 405 - protein, 112 aa, synthetic construct
  REGION 1..112: note = VL-32 Peptide Sequence
NIMMTQSPSSLAVSAGEKVTMSCKSSQSVLYSSNQKNYLAWYQQKPGQSPKLLIYWASTRESGVPDRFTGSGSGTDFTLTISSVQAEDLAVYYCHQYLSSLTFGAGTKLELK

SEQ ID NO: 406 - protein, 113 aa, synthetic construct
  REGION 1..113: note = VL-33 Peptide Sequence
DIVMTQSPSSLAMSVGQKVTMSCKSSQSLLNSSNQKNYLAWYQQKPGQSPKLLVYFASTRESGVPDRFIGSGSGTDFTLTISSVQAEDLADYFCQQHYSTPYTFGGGAKLEIK

SEQ ID NO: 407 - protein, 107 aa, synthetic construct
  REGION 1..107: note = VL-34 Peptide Sequence
DIRMTQSPSSLSASLGDTITITCHASQNINVWLSWYQQKPGNIPKLLIYKASNLHTGVPSRFSGSGSGTGFTLTISSLQPEDIATYYCQQGQSYPYTFGGGTKLELK

SEQ ID NO: 408 - protein, 107 aa, synthetic construct
  REGION 1..107: note = VL-35 Peptide Sequence
EIVLTQSPASLSVTTGEKVTIRCITSIDIDDDMNWYQQKPGEPPKLLISEGNTLRPGVPSRFSSSGYGTDFVFTIENTLSEDVADYYCLQSDNKPLTFGAGTKLELK

SEQ ID NO: 409 - protein, 107 aa, synthetic construct
  REGION 1..107: note = VL-36 Peptide Sequence
DIQVIQSPSSLSASLGDTITITCHASQNINVWLSWYQQKPGNIPKLLIYKASNLHTGVPSRFSGSGSGTGFTLTISSLQPEDIATYYCQQGQSYPYTFGGGTKLELK

SEQ ID NO: 410 - protein, 107 aa, synthetic construct
  REGION 1..107: note = VL-37 Peptide Sequence
EIKMNQSPSSLSASLGDTITITCHASQNINVWLSWYQQKPGNIPKLLIYKASNLHTGVPSRFSGSGSGTGFTLTISSLQPEDIATYYCQQGQSYPYTFGGGTKLELK

SEQ ID NO: 411 - protein, 109 aa, synthetic construct
  REGION 1..109: note = VL-38 Peptide Sequence
QAVVTQESALTTSPGETVTLTCRSSTGAVTTSNYANWVQEKPDHLFTGLIGGTNNRAPGVPARFSGSLIGDKAALTITGAQTEDEAIYFCALWYSNHLVFGGGTKLTVL

SEQ ID NO: 412 - protein, 112 aa, synthetic construct
  REGION 1..112: note = VL-39 Peptide Sequence
DVLMTQTPLSLPVSLGDQASISCRSSQDIVHSSGNTYLEWYLQKPGQSLKLLIYKVSNRFSGVPDRFSASGSGTDFTLKISRVEAEDLGVYYCFQGSHVPPTFGSGTKLEIK

SEQ ID NO: 413 - protein, 112 aa, synthetic construct
  REGION 1..112: note = VL-40 Peptide Sequence
DIGMRQAAFSNPVTLGTSASISCRSSKSLLYSNGITYLYWFLQKPGQSPQLLIYQMSNLASGVPDRFSSSGSGTDFTLRISRVEADDVGVYYCAQNLELPWTFGGGTKLEIK

SEQ ID NO: 414 - protein, 111 aa, synthetic construct
  REGION 1..111: note = VL-41 Peptide Sequence
DIVLTQSPASLGVSLGQRATISCRASKSVSTSGYSYMHWYQQKPGQPPKLLIYLASILESGVPARFSGSGSGTDFTLNIHPVEEEDAAIYYCQHSRELPLTFGAGTKLELK

SEQ ID NO: 415 - protein, 111 aa, synthetic construct
  REGION 1..111: note = VL-42 Peptide Sequence
NIVLTQSPASLAVSLGQRATISCRASESVDSYGNSFMHWYQQKPGQPPKLLIYLASNLESGVPARFSGSGSRTDFTLTIDPVEADDAATYYCQQNNEDPWTFGGGTKLEIK

SEQ ID NO: 416 - protein, 112 aa, synthetic construct
  REGION 1..112: note = VL-43 Peptide Sequence
DVVMTQTPLTLSVTIGQPASISCKSSQSLLYSNGKTYLNWLLQRPGQSPKRLIYLVSKLDSGVPDRFTGSGSGTDFTLKISRVEAEDLGVYYCVQGTHFPQTFGGGTKLEIK

SEQ ID NO: 417 - protein, 107 aa, synthetic construct
  REGION 1..107: note = VL-44 Peptide Sequence
DILMTQSPSSMSVSLGDTVSITCHASQGINSNIGWLQQKPGKSFKGLIYHGTNLEDGVPSRFSGSGSGADYSLTISSLESEDFADYYCVQYDQFPWTFGGGTKLEIK

SEQ ID NO: 418 - protein, 111 aa, synthetic construct
  REGION 1..111: note = VL-45 Peptide Sequence
DIVMSQSPASLGVSLGQRATISCRASKSVSTSGYSYMHWYQQKPGQPPKLLIYLASILESGVPARFSGSGSGTDFTLNIHPVEEEDAAIYYCQHSRELPLTFGAGTKLELK

SEQ ID NO: 419 - protein, 111 aa, synthetic construct
  REGION 1..111: note = VL-46 Peptide Sequence
DIVLTQSPASLAVSLGQRATISCRASKSVSTSGYSYMHWYQQKPGQPPKLLIYLASILESGVPARFSGSGSGTDFTLNIHPVEEEDAATYYCQHSRELPLTFGAGTKLELK

SEQ ID NO: 420 - protein, 107 aa, synthetic construct
  REGION 1..107: note = VL-47 Peptide Sequence
DILMTQTPSSMSVSLGDTVSITCHASQGISSNIGWLQQKPRKSFKGLIYYGTNLEDGVPSRFSGSGSGADYSLTISSLESEDFADYYCVQYDQFPWTFGGGTKLEIK

SEQ ID NO: 421 - protein, 111 aa, synthetic construct
  REGION 1..111: note = VL-48 Peptide Sequence
DIVLTQSPASLAVSLGQRATISCRASKSVSTSGYSCMHWYQQKPGQPPKLLIYLASNLESGVPARFSGGGSGTDFTLSIHPVEEEDAATYYCHHSTELPYTFGGGTKLEVE

SEQ ID NO: 422 - protein, 111 aa, synthetic construct
  REGION 1..111: note = VL-49 Peptide Sequence
DIVLTQSPASLAVSLGQRATISCRASESVDSYGNSFMHWYQQKPGQPPKLLIYLASNLESGVPARFSGSGSRTDFTLTIDPVEADDAATYYCQQNNEDPWTFGGGTKLEIK

SEQ ID NO: 423 - protein, 111 aa, synthetic construct
  REGION 1..111: note = VL-50 Peptide Sequence
DVVMTQTPLTLSVTIGQPASISCKSSQSLLYSDGKTYLNWLLQRPGQSPKRLIYLVSQLDSGVPDRFTGSGSGTDFTLKISRVEADDLGVYCCVQGTHLPTFGGGTKLEIK

SEQ ID NO: 424 - protein, 111 aa, synthetic construct
  REGION 1..111: note = VL-51 Peptide Sequence
DIVMTQSPASLAVSLGQRATISCRASESVENHVNSFMHWFQQKPGQPPKLLIYRASNLQSGIPARFSGSGSRTDFTLTINPVEADDVATYYCQQNNEVPYTFGGGTKLEIK

SEQ ID NO: 425 - protein, 106 aa, synthetic construct
  REGION 1..106: note = VL-52 Peptide Sequence
QIVLSQSPAILSASPGEKVTMTCRASSSVTYMYWYQQKPGSSPQPWIYATSNLASGVPARFSGSGSGTSYSLTISRVEAEDAATYYCQQWSSNPLTFGAGTKLELK

SEQ ID NO: 426 - protein, 111 aa, synthetic construct
  REGION 1..111: note = VL-53 Peptide Sequence
DIVLTQSPASLAVSLGQRATISCRASESLDNSGISFMNWFQQRPGQPPKLLIYAASNLESGVPARFSGSGSGTDFSLNIHPMEEDDAAMYFCQHSKEVPWTFGGGTKLEIK

SEQ ID NO: 427 - protein, 107 aa, synthetic construct
  REGION 1..107: note = VL-54 Peptide Sequence
DIVMTQSHKIMSTSVGDRVSITCKASQDVSTTVAWFQQKPGQSPKLLLYWASTRHTGVPDRFTGSGSGTDYTLTISSVQAEDLALYYCQQHYSPPFTFGSGTKLEIK

SEQ ID NO: 428 - protein, 107 aa, synthetic construct
  REGION 1..107: note = VL-55 Peptide Sequence
DIVMTQSQKFMSTSVGDRVSVTCKASQNVGINVAWYQQKPGQSPKALIYSASYRYSGVPDRFTGSGSGTDFTLTISNVQSEDLAEYFCQQYNSYPYTFGGGTKLEMK

SEQ ID NO: 429 - protein, 112 aa, synthetic construct
  REGION 1..112: note = VL-56 Peptide Sequence
DVVMTQTPLTLSVTLGQPASISCRSSQSLLDSDGKTYLNWLLQRPGQSPKRLIYLVSRLDSGVPDRFTGSGSGTDFTLKISRVEAEDLGVYYCWQGTHFPFTFGGGTKLEIK

SEQ ID NO: 430 - protein, 107 aa, synthetic construct
  REGION 1..107: note = VL-57 Peptide Sequence
DIRMTQSPASLSASVGETVTITCRASGNIHNYLAWYHQKQGKSPQLLVYNVKTLADGVPSRFSGSGSGTQFSLKINSLQPEDFGTYYCQHFWSIFPTFGGGTKLEIK

SEQ ID NO: 431 - protein, 106 aa, synthetic construct
  REGION 1..106: note = VL-58 Peptide Sequence
QILLSQSPAILSASPGEKVTMTCRASSSVTYMYWYQQKPGSSPQPWIYATSNLASGVPARFSGSGSGTSYSLTISRVEAEDAATYYCQQWSSNPLTFGAGTKLELK

SEQ ID NO: 432 - protein, 107 aa, synthetic construct
  REGION 1..107: note = VL-59 Peptide Sequence
DILMTQSPASLSASVGETVTITCRASGNIHNYLAWYQQKQGKSPQLLVYSAKTLADGVPSRFSGSGSGTQFSLKIDSLQPEDFGTYYCQHFWSLFPTFGGGTKLEIK

SEQ ID NO: 433 - protein, 107 aa, synthetic construct
  REGION 1..107: note = VL-60 Peptide Sequence
DVVMTQTPKFLLVSAGDRVTITCKASQSVSSDVAWYQQKPGQSPKLLIYFASNRYTGVPDRFTGSGYGTDFTFTISTVQAEDLAVYFCQHNYISPFTFGGGTKLEIK

SEQ ID NO: 434 - protein, 107 aa, synthetic construct
  REGION 1..107: note = VL-61 Peptide Sequence
DIVMTQSHKFMSTSVGDRVSITCKASQDVSTAVAWYQQKPGQSPKLLIYWASTRHTGVPDRFTGSGSGTDYTLTISSVQAEDLALYYCQQHYSTPYTFGGGTKLEIK

SEQ ID NO: 435 - protein, 107 aa, synthetic construct
  REGION 1..107: note = VL-62 Peptide Sequence
DIAMTQSHKFMSTSVGDRVSITCKASQDVSTAVAWYQQKPGQSPKLLIYWASTRHTGVPDRFTGSGSGTDYTLTISSVQAEDLALYYCQQHYNTPYTFGGGTKLEIK

SEQ ID NO: 436 - protein, 112 aa, synthetic construct
  REGION 1..112: note = VL-63 Peptide Sequence
DVGMTQTPLILSVTIGQPASISCKSSQSLLYINGKTYLNWLLQRPGQSPKRLIYLVSKLDSGVPNRFSGSGSGTDFTLKISRVEAEDLGVYYCLQSTHFPQTFGGGTKLEIK

SEQ ID NO: 437 - protein, 107 aa, synthetic construct
  REGION 1..107: note = VL-64 Peptide Sequence
DILLTQSPSSMSVSLGDTVSITCHASQGINSNIGWLQQKPGKSFKGLIYHGTNLEDGVPSRFSGSGSGADYSLTISSLESEDFADYYCVQYDQFPWTFGGGTKLEIK

SEQ ID NO: 438 - protein, 112 aa, synthetic construct
  REGION 1..112: note = VL-65 Peptide Sequence
DIVMTQAAPSVPVTPGESVSISCRSSRSLLHSNGYTYLYWFLQRPGQSPRLLIYRMSNLASGVPDRFSGSGSGTAFTLRISRVEAEDVGVYYCMQHLEYPYTFGGGTKLEIK

SEQ ID NO: 439 - protein, 107 aa, synthetic construct
  REGION 1..107: note = VL-66 Peptide Sequence
DIQMTQTTSSLSASLGDRVTISCSASQGISNYLNWYQQKPDGTVKLLIYYTSSLHSGVPSRFSGSGSGTDYSLTISNLEPEDIATYYCQQYSKLPRTFGGGTKLEIN

SEQ ID NO: 440 - protein, 112 aa, synthetic construct
  REGION 1..112: note = VL-67 Peptide Sequence
DVVMTQTPLTLSVTIGQPASISCKSSRSLLDSDGKTYLNWLLQRPGQSPKRLIYLVSKLDSGVPDRFTGSGSGTDFTLKISRVEAEDLGVYYCWQGTHFPQTFGGGTKLEIN

SEQ ID NO: 441 - protein, 107 aa, synthetic construct
  REGION 1..107: note = VL-68 Peptide Sequence
DIQMNQSPSSLSASLGDTITITCHASQNINVWLSWYQQKPGNIPKLLIYQASNLHTGVPSRFSGRGSGTGFTLTISSLQPEDIATYYCQQGQSSPFTFGSGTKLEIK

SEQ ID NO: 442 - protein, 107 aa, synthetic construct
  REGION 1..107: note = VL-69 Peptide Sequence
DILMTQSHKFMSTSVGDRVSITCKASQDVSSVVVWYQQKPGQSPKQLIYWASTRHTGVPDRFTGSGSGTDYTLTISSVQAEDLALYYCQQHYSTPYTFGGGTKLEIK

SEQ ID NO: 443 - protein, 109 aa, synthetic construct
  REGION 1..109: note = VL-70 Peptide Sequence
QAVVTQESALTTSPGETVTLTCRSSTGAVTTSNYANWDQEKPDHLFTGLIGGTNNRAPGVPARFSGSLIGDKAALTITGAQTEDEAIYFCALWYSNHLVFGGGTKVTVL

SEQ ID NO: 444 - protein, 111 aa, synthetic construct
  REGION 1..111: note = VL-71 Peptide Sequence
DIVMTQSPASLPVSLGQRATISCRASKSVTTSAYSYIHWYQQRPGQPPKLLIYLASNLESGVPARFSGSGSGTDFTLNIHPVEEEDAATYYCQHNRELPPTFGGGTKLEIN

SEQ ID NO: 445 - protein, 107 aa, synthetic construct
  REGION 1..107: note = VL-72 Peptide Sequence
DIVLTQSPATLSVTPGDSVSFSCRASQIINNNLHWYQQKSHESPRLLIRYTSQSISGIPSRFSGSGSGTDFTLSINNVETEDFGMYFCQQTNSWPLTFGAGTKLELK

SEQ ID NO: 446 - protein, 111 aa, synthetic construct
  REGION 1..111: note = VL-73 Peptide Sequence
DVVMTQTPLTLSVTIEQTASISCKSSQSLLDRDGKTYLNWLLQRPGQSPKRLIYLVSKLDSGVPDRFTGSGSGTDFTLKISRVEAEDLGVYYCWQGTHFPTFGGGTKLEIK

SEQ ID NO: 447 - protein, 107 aa, synthetic construct
  REGION 1..107: note = VL-74 Peptide Sequence
DVVMTQTPKFLPITAEDRVTITCKASQSVSNEVAWYQQKPGQSPKLLIYYASNRYTGVPDRFTGSGSGTDFTFTIRSVQLEDLAVYFCQQHYSSPWTFGGGTKLEIK

SEQ ID NO: 448 - protein, 442 aa, synthetic construct
  REGION 1..442: note = TB001 heavy chain peptide sequence
QVQLVQSGSELKKPGASVKVSCKASGYTFTNYGMNWVRQAPGQGLKWMGWINTNTGEPTYVEEFTGRFVFSLETSVSTAYLQISSLKAEDTAVYFCAPYDNFFAYWGQGTTVTVSSASTKGPSVFPLAPCSRSTSESTAALGCLVKDYFPEPVTVSWNSGALTSGVHTFPAVLQSSGLYSLSSVVTVPSSSLGTKTYTCNVDHKPSNTKVDKRVESKYGPPCPPCPAPEFLGGPSVFLFPPKPKDTLMISRTPEVTCVVVDVSQEDPEVQFNWYVDGVEVHNAKTKPREEQFNSTYRVVSVLTVLHQDWLNGKEYKCKVSNKGLPSSIEKTISKAKGQPREPQVYTLPPSQEEMTKNQVSLTCLVKGFYPSDIAVEWESNGQPENNYKTTPPVLDSDGSFFLYSRLTVDKSRWQEGNVFSCSVMHEALHNHYTQKSLSLSLG

SEQ ID NO: 449 - protein, 442 aa, synthetic construct
  REGION 1..442: note = TB006 heavy chain peptide sequence
QVQLVQSGAEVKKPGASVKVSCKASGYSFTNYYMHWVRQAPGQRLEWMGWIYPGSGNTNYNEKFQGRVTITADTSASTAYMELSSLRSEDTAVYYCSTAPGGFDVWGQGTTVTVSSASTKGPSVFPLAPCSRSTSESTAALGCLVKDYFPEPVTVSWNSGALTSGVHTFPAVLQSSGLYSLSSVVTVPSSSLGTKTYTCNVDHKPSNTKVDKRVESKYGPPCPPCPAPEFLGGPSVFLFPPKPKDTLMISRTPEVTCVVVDVSQEDPEVQFNWYVDGVEVHNAKTKPREEQFNSTYRVVSVLTVLHQDWLNGKEYKCKVSNKGLPSSIEKTISKAKGQPREPQVYTLPPSQEEMTKNQVSLTCLVKGFYPSDIAVEWESNGQPENNYKTTPPVLDSDGSFFLYSRLTVDKSRWQEGNVFSCSVMHEALHNHYTQKSLSLSLG

SEQ ID NO: 450 - protein, 452 aa, synthetic construct
  REGION 1..452: note = 12G5.D7 heavy chain peptide sequence
QVQLKQSGAELVRPGASVKLSCKASGYTFTDYYINWVKQRPGQGLEWIARIYPGTGNTDYNEKFKGRATLTAEKSSSTAYMQLSSLTSEDSAVYFCARFAYYYGSGGYFDYWGHGTTLTVSSAKTTPPSVYPLAPVCGDTTGSSVTLGCLVKGYFPEPVTLTWNSGSLSSGVHTFPAVLQSDLYTLSSSVTVTSSTWPSQSITCNVAHPASSTKVDKKIEPRGPTIKPCPPCKCPAPNAAGGPSVFIFPPKIKDVLMISLSPIVTCVVVDVSEDDPDVQISWFVNNVEVHTAQTQTHREDYNSTLRVVSALPIQHQDWMSGKEFKCKVNNKDLGAPIERTISKPKGSVRAPQVYVLPPPEEEMTKKQVTLTCMVTDFMPEDIYVEWTNNGKTELNYKNTEPVLDSDGSYFMYSKLRVEKKNWVERNSYSCSVVHEGLHNHHTTKSFSRTPGK

SEQ ID NO: 451 - protein, 449 aa, synthetic construct
  REGION 1..449: note = 13A12.2E5 heavy chain peptide sequence
QIQLVQSGPELKKPGETVKISCKTSGYKFKTYVMSWVKQAPGKALKWMGWINTYSGVPTYADDFKGRFAFSLETSASTAYLEIINLKNEDTATYFCARDGNYGDPMDYWGQGTSVTVSSAKTTPPSVYPLAPVCGDTTGSSVTLGCLVKGYFPEPVTLTWNSGSLSSGVHTFPAVLQSDLYTLSSSVTVTSSTWPSQSITCNVAHPASSTKVDKKIEPRGPTIKPCPPCKCPAPNAAGGPSVFIFPPKIKDVLMISLSPIVTCVVVDVSEDDPDVQISWFVNNVEVHTAQTQTHREDYNSTLRVVSALPIQHQDWMSGKEFKCKVNNKDLGAPIERTISKPKGSVRAPQVYVLPPPEEEMTKKQVTLTCMVTDFMPEDIYVEWTNNGKTELNYKNTEPVLDSDGSYFMYSKLRVEKKNWVERNSYSCSVVHEGLHNHHTTKSFSRTPGK

SEQ ID NO: 452 - protein, 447 aa, synthetic construct
  REGION 1..447: note = 14H10.2C9 heavy chain peptide sequence
QIQLVQSGPELKKPGETVKISCKASGYTFTTYGMGWVKQAPGKDLKWMGWINTYSGVPTYADDFKGRFAFSLETSASTAYLQISNLKNEDTATYFCSTPYEYDGAYWGQGTLVTVSAAKTTPPSVYPLAPVCGDTTGSSVTLGCLVKGYFPEPVTLTWNSGSLSSGVHTFPAVLQSDLYTLSSSVTVTSSTWPSQSITCNVAHPASSTKVDKKIEPRGPTIKPCPPCKCPAPNAAGGPSVFIFPPKIKDVLMISLSPIVTCVVVDVSEDDPDVQISWFVNNVEVHTAQTQTHREDYNSTLRVVSALPIQHQDWMSGKEFKCKVNNKDLGAPIERTISKPKGSVRAPQVYVLPPPEEEMTKKQVTLTCMVTDFMPEDIYVEWTNNGKTELNYKNTEPVLDSDGSYFMYSKLRVEKKNWVERNSYSCSVVHEGLHNHHTTKSFSRTPGK

SEQ ID NO: 453 - protein, 443 aa, synthetic construct
  REGION 1..443: note = 15F10.2D6 heavy chain peptide sequence
EVQLVESGGGLVKPGGSLKLSCAASGFAFSSYAMSWVRQTPEKRLEWVATISDGGVYTYYTDHVKGRFTISRDNAEDNLYLQMSHLKSEDTAMYYCVRDGGYWGQGTTLTVSSAKTTPPSVYPLAPVCGDTTGSSVTLGCLVKGYFPEPVTLTWNSGSLSSGVHTFPAVLQSDLYTLSSSVTVTSSTWPSQSITCNVAHPASSTKVDKKIEPRGPTIKPCPPCKCPAPNAAGGPSVFIFPPKIKDVLMISLSPIVTCVVVDVSEDDPDVQISWFVNNVEVHTAQTQTHREDYNSTLRVVSALPIQHQDWMSGKEFKCKVNNKDLGAPIERTISKPKGSVRAPQVYVLPPPEEEMTKKQVTLTCMVTDFMPEDIYVEWTNNGKTELNYKNTEPVLDSDGSYFMYSKLRVEKKNWVERNSYSCSVVHEGLHNHHTTKSFSRTPGK

SEQ ID NO: 454 - protein, 446 aa, synthetic construct
  REGION 1..446: note = 19B5.2E6 heavy chain peptide sequence
QIQLVQSGPELKKPGETVKISCKASGYTFTTYAMSWVKQAPGKGLKWMGWINTYSGVPTYADDLKGRFAFSLETSASTAYLQINNLKNEDTATYFCARGPYAMDYWGQGTSVTVSSAKTTPPSVYPLAPVCGDTTGSSVTLGCLVKGYFPEPVTLTWNSGSLSSGVHTFPAVLQSDLYTLSSSVTVTSSTWPSQSITCNVAHPASSTKVDKKIEPRGPTIKPCPPCKCPAPNAAGGPSVFIFPPKIKDVLMISLSPIVTCVVVDVSEDDPDVQISWFVNNVEVHTAQTQTHREDYNSTLRVVSALPIQHQDWMSGKEFKCKVNNKDLGAPIERTISKPKGSVRAPQVYVLPPPEEEMTKKQVTLTCMVTDFMPEDIYVEWTNNGKTELNYKNTEPVLDSDGSYFMYSKLRVEKKNWVERNSYSCSVVHEGLHNHHTTKSFSRTPGK

SEQ ID NO: 455 - protein, 445 aa, synthetic construct
  REGION 1..445: note = 20D11.2C6 heavy chain peptide sequence
EVQLQQSGPELVKPGASVKISCKASGYTFTDFYINWVKQSHGKSLEWIGDINPKNGGINYNPKFKIKATLTVDKSSSTSYMDLRGLTSEDSAVYYCTSGYGFPYWGQGTLVTVSAAKTTPPSVYPLAPVCGDTTGSSVTLGCLVKGYFPEPVTLTWNSGSLSSGVHTFPAVLQSDLYTLSSSVTVTSSTWPSQSITCNVAHPASSTKVDKKIEPRGPTIKPCPPCKCPAPNAAGGPSVFIFPPKIKDVLMISLSPIVTCVVVDVSEDDPDVQISWFVNNVEVHTAQTQTHREDYNSTLRVVSALPIQHQDWMSGKEFKCKVNNKDLGAPIERTISKPKGSVRAPQVYVLPPPEEEMTKKQVTLTCMVTDFMPEDIYVEWTNNGKTELNYKNTEPVLDSDGSYFMYSKLRVEKKNWVERNSYSCSVVHEGLHNHHTTKSFSRTPGK

SEQ ID NO: 456 - protein, 446 aa, synthetic construct
  REGION 1..446: note = 20H5.A3 heavy chain peptide sequence
QIQLVQSGPELKKPGESVKISCKASGYAFTTYGMSWVQQAPGKGLKWMGWVNTYSGVPTCADDFKGRFAFSLETSASTAYLQINNLRNEDTATYFCARGPYAMDYWGQGTSVTVSSAKTTPPSVYPLAPVCGDTTGSSVTLGCLVKGYFPEPVTLTWNSGSLSSGVHTFPAVLQSDLYTLSSSVTVTSSTWPSQSITCNVAHPASSTKVDKKIEPRGPTIKPCPPCKCPAPNAAGGPSVFIFPPKIKDVLMISLSPIVTCVVVDVSEDDPDVQISWFVNNVEVHTAQTQTHREDYNSTLRVVSALPIQHQDWMSGKEFKCKVNNKDLGAPIERTISKPKGSVRAPQVYVLPPPEEEMTKKQVTLTCMVTDFMPEDIYVEWTNNGKTELNYKNTEPVLDSDGSYFMYSKLRVEKKNWVERNSYSCSVVHEGLHNHHTTKSFSRTPGK

SEQ ID NO: 457 - protein, 446 aa, synthetic construct; identical to SEQ ID NO: 454
  REGION 1..446: note = 23H9.2E4 heavy chain peptide sequence

SEQ ID NO: 458 - protein, 450 aa, synthetic construct
  REGION 1..450: note = 2D10.2B2 heavy chain peptide sequence
QVQLQQSGPELVKPGASVKISCKASGYTFTDYYINWVKQRPGQGLEWIGWIYPGSNDTKYNEKFKGKATLTVDTSSSTAYMQLGSLTSEDSAVYFCANYFGCSGWFFDVWGTGTTVTVSSAKTTPPSVYPLAPVCGDTTGSSVTLGCLVKGYFPEPVTLTWNSGSLSSGVHTFPAVLQSDLYTLSSSVTVTSSTWPSQSITCNVAHPASSTKVDKKIEPRGPTIKPCPPCKCPAPNAAGGPSVFIFPPKIKDVLMISLSPIVTCVVVDVSEDDPDVQISWFVNNVEVHTAQTQTHREDYNSTLRVVSALPIQHQDWMSGKEFKCKVNNKDLGAPIERTISKPKGSVRAPQVYVLPPPEEEMTKKQVTLTCMVTDFMPEDIYVEWTNNGKTELNYKNTEPVLDSDGSYFMYSKLRVEKKNWVERNSYSCSVVHEGLHNHHTTKSFSRTPGK

SEQ ID NO: 459 - protein, 449 aa, synthetic construct; identical to SEQ ID NO: 451
  REGION 1..449: note = 3B11.2G2 heavy chain peptide sequence

SEQ ID NO: 460 - protein, 443 aa, synthetic construct
  REGION 1..443: note = 7D8.2D8 heavy chain peptide sequence
EVQLVESGGGLVKPGGSLKLSCAASGFTFSSYAMSWVRQTPEKRLEWVATISDGGIYTYYPDNVKGRFTISRDNAKNNLFLQMSHLKSEDTAMYYCVRDGGYWGQGTTLTVSSAKTTPPSVYPLAPVCGDTTGSSVTLGCLVKGYFPEPVTLTWNSGSLSSGVHTFPAVLQSDLYTLSSSVTVTSSTWPSQSITCNVAHPASSTKVDKKIEPRGPTIKPCPPCKCPAPNAAGGPSVFIFPPKIKDVLMISLSPIVTCVVVDVSEDDPDVQISWFVNNVEVHTAQTQTHREDYNSTLRVVSALPIQHQDWMSGKEFKCKVNNKDLGAPIERTISKPKGSVRAPQVYVLPPPEEEMTKKQVTLTCMVTDFMPEDIYVEWTNNGKTELNYKNTEPVLDSDGSYFMYSKLRVEKKNWVERNSYSCSVVHEGLHNHHTTKSFSRTPGK

SEQ ID NO: 461 - protein, 446 aa, synthetic construct
  REGION 1..446: note = mTB001 heavy chain peptide sequence
QIQLVQSGPELKKPGETVKISCKASGYTFTNYGMNWVKQAPGKGLKWMGWINTNTGEPTYVEEFKGRFAFSLETSASTAYLQINNLKNEDTATYFCAPYDNFFAYWGQGTLVTVSAAKTTPPSVYPLAPVCGDTTGSSVTLGCLVKGYFPEPVTLTWNSGSLSSGVHTFPAVLQSDLYTLSSSVTVTSSTWPSQSITCNVAHPASSTKVDKKIEPRGPTIKPCPPCKCPAPNAAGGPSVFIFPPKIKDVLMISLSPIVTCVVVDVSEDDPDVQISWFVNNVEVHTAQTQTHREDYNSTLRVVSALPIQHQDWMSGKEFKCKVNNKDLGAPIERTISKPKGSVRAPQVYVLPPPEEEMTKKQVTLTCMVTDFMPEDIYVEWTNNGKTELNYKNTEPVLDSDGSYFMYSKLRVEKKNWVERNSYSCSVVHEGLHNHHTTKSFSRTPGK

SEQ ID NO: 462 - protein, 442 aa, synthetic construct
  REGION 1..442: note = 4A11.2B5 heavy chain peptide sequence
QVQLQQSGPELVKPGASVKISCKASGYSFTNYYIHWVKQRPGQGLEWIGWIYPGSGNTNYNEKFKGKATLTADTSSSTTNMQLSSLTSEDSAVYYCSTAPGGFDVWGSGTTVTVSSASTKGPSVFPLAPCSRSTSESTAALGCLVKDYFPEPVTVSWNSGALTSGVHTFPAVLQSSGLYSLSSVVTVPSSSLGTKTYTCNVDHKPSNTKVDKRVESKYGPPCPPCPAPEFLGGPSVFLFPPKPKDTLMISRTPEVTCVVVDVSQEDPEVQFNWYVDGVEVHNAKTKPREEQFNSTYRVVSVLTVLHQDWLNGKEYKCKVSNKGLPSSIEKTISKAKGQPREPQVYTLPPSQEEMTKNQVSLTCLVKGFYPSDIAVEWESNGQPENNYKTTPPVLDSDGSFFLYSRLTVDKSRWQEGNVFSCSVMHEALHNHYTQKSLSLSLG

SEQ ID NO: 463 - protein, 442 aa, synthetic construct
  REGION 1..442: note = 4A11.H1L1 heavy chain peptide sequence
QVQLVQSGAEVKKPGASVKVSCKASGYSFTNYYMHWVRQAPGQGLEWMGWIYPGSGNTNYNEKFQGRVTMTADTSISTAYMELSRLRSDDTAVYYCSTAPGGFDVWGQGTTVTVSSASTKGPSVFPLAPCSRSTSESTAALGCLVKDYFPEPVTVSWNSGALTSGVHTFPAVLQSSGLYSLSSVVTVPSSSLGTKTYTCNVDHKPSNTKVDKRVESKYGPPCPPCPAPEFLGGPSVFLFPPKPKDTLMISRTPEVTCVVVDVSQEDPEVQFNWYVDGVEVHNAKTKPREEQFNSTYRVVSVLTVLHQDWLNGKEYKCKVSNKGLPSSIEKTISKAKGQPREPQVYTLPPSQEEMTKNQVSLTCLVKGFYPSDIAVEWESNGQPENNYKTTPPVLDSDGSFFLYSRLTVDKSRWQEGNVFSCSVMHEALHNHYTQKSLSLSLG

SEQ ID NO: 464 - protein, 442 aa, synthetic construct
  REGION 1..442: note = 4A11.H4L2 heavy chain peptide sequence
QVQLVQSGAEVKKPGASVKVSCKASGYSFTNYYIHWVRQAPGQRLEWMGWIYPGSGNTNYNEKFQGRVTLTADTSASTTYMELSSLRSEDTAVYYCSTAPGGFDVWGQGTTVTVSSASTKGPSVFPLAPCSRSTSESTAALGCLVKDYFPEPVTVSWNSGALTSGVHTFPAVLQSSGLYSLSSVVTVPSSSLGTKTYTCNVDHKPSNTKVDKRVESKYGPPCPPCPAPEFLGGPSVFLFPPKPKDTLMISRTPEVTCVVVDVSQEDPEVQFNWYVDGVEVHNAKTKPREEQFNSTYRVVSVLTVLHQDWLNGKEYKCKVSNKGLPSSIEKTISKAKGQPREPQVYTLPPSQEEMTKNQVSLTCLVKGFYPSDIAVEWESNGQPENNYKTTPPVLDSDGSFFLYSRLTVDKSRWQEGNVFSCSVMHEALHNHYTQKSLSLSLG

SEQ ID NO: 465 - protein, 445 aa, synthetic construct
  REGION 1..445: note = 4G2.2G6 heavy chain peptide sequence
QIQLVQSGPDLKKPGETVKISCKASGYTFTTYVMSWVKQAPGKDLKWMGWINTHSGVPTYADDFKGRFDFSLETSANTAFLQINNLKNEDTATYFCTRDGNDGDAMDNWGQGTSVTVSSASTKGPSVFPLAPCSRSTSESTAALGCLVKDYFPEPVTVSWNSGALTSGVHTFPAVLQSSGLYSLSSVVTVPSSSLGTKTYTCNVDHKPSNTKVDKRVESKYGPPCPPCPAPEFLGGPSVFLFPPKPKDTLMISRTPEVTCVVVDVSQEDPEVQFNWYVDGVEVHNAKTKPREEQFNSTYRVVSVLTVLHQDWLNGKEYKCKVSNKGLPSSIEKTISKAKGQPREPQVYTLPPSQEEMTKNQVSLTCLVKGFYPSDIAVEWESNGQPENNYKTTPPVLDSDGSFFLYSRLTVDKSRWQEGNVFSCSVMHEALHNHYTQKSLSLSLG

SEQ ID NO: 466 - protein, 446 aa, synthetic construct
  REGION 1..446: note = 6B3.2D3 heavy chain peptide sequence
QVQLKQSGPGLVQPSQSLSITCTVSGFSLTSYGVHWVRQPPGKGLEWLGVIWSGGSTDYNAAFISRLSISKDNSKSQVFFKMNSLQADDTAIYYCAKGPYDYDLGWFAYWGQGTLVTVSAASTKGPSVFPLAPCSRSTSESTAALGCLVKDYFPEPVTVSWNSGALTSGVHTFPAVLQSSGLYSLSSVVTVPSSSLGTKTYTCNVDHKPSNTKVDKRVESKYGPPCPPCPAPEFLGGPSVFLFPPKPKDTLMISRTPEVTCVVVDVSQEDPEVQFNWYVDGVEVHNAKTKPREEQFNSTYRVVSVLTVLHQDWLNGKEYKCKVSNKGLPSSIEKTISKAKGQPREPQVYTLPPSQEEMTKNQVSLTCLVKGFYPSDIAVEWESNGQPENNYKTTPPVLDSDGSFFLYSRLTVDKSRWQEGNVFSCSVMHEALHNHYTQKSLSLSLG

SEQ ID NO: 467 - protein, 442 aa, synthetic construct
  REGION 1..442: note = 6H6.2D6 heavy chain peptide sequence
QIQLVQSGPELKKPGETVKISCKASGYTFTTYGMSWVKQAPGKGLKWMAWINTYSGVPTYADDFKGRFAFSLETSASTAYLQINNLTNEDTATYFCARGPYAMDYWGQGTSVTVSSASTKGPSVFPLAPCSRSTSESTAALGCLVKDYFPEPVTVSWNSGALTSGVHTFPAVLQSSGLYSLSSVVTVPSSSLGTKTYTCNVDHKPSNTKVDKRVESKYGPPCPPCPAPEFLGGPSVFLFPPKPKDTLMISRTPEVTCVVVDVSQEDPEVQFNWYVDGVEVHNAKTKPREEQFNSTYRVVSVLTVLHQDWLNGKEYKCKVSNKGLPSSIEKTISKAKGQPREPQVYTLPPSQEEMTKNQVSLTCLVKGFYPSDIAVEWESNGQPENNYKTTPPVLDSDGSFFLYSRLTVDKSRWQEGNVFSCSVMHEALHNHYTQKSLSLSLG

SEQ ID NO: 468 - protein, 441 aa, synthetic construct
  REGION 1..441: note = 9H2.2H10 heavy chain peptide sequence
QVQLQQPGAELVGPGSSVKLSCKASGYTFTNYWIHWVKQRPLQGLEWIGNIDPSDSETHYNQKFKDKATLTVDKSSSTAYMQLSSLTSEDSAVYYCARHGYYDYWGQGTTLTVSSASTKGPSVFPLAPCSRSTSESTAALGCLVKDYFPEPVTVSWNSGALTSGVHTFPAVLQSSGLYSLSSVVTVPSSSLGTKTYTCNVDHKPSNTKVDKRVESKYGPPCPPCPAPEFLGGPSVFLFPPKPKDTLMISRTPEVTCVVVDVSQEDPEVQFNWYVDGVEVHNAKTKPREEQFNSTYRVVSVLTVLHQDWLNGKEYKCKVSNKGLPSSIEKTISKAKGQPREPQVYTLPPSQEEMTKNQVSLTCLVKGFYPSDIAVEWESNGQPENNYKTTPPVLDSDGSFFLYSRLTVDKSRWQEGNVFSCSVMHEALHNHYTQKSLSLSLG

SEQ ID NO: 469 - protein, 445 aa, synthetic construct
  REGION 1..445: note = 13G4.2F8 heavy chain peptide sequence
QVQLQQPGAELVKPGASVKLSCKASGYTFTSYWMHWVKQRPGQGLEWIGMIHPNSGSTDYNEKFKNKATLNVDKSSSTAYIQLSSLTSEDSAVYYCTRWGIYYYARDYWGQGTTLTVSSASTKGPSVFPLAPCSRSTSESTAALGCLVKDYFPEPVTVSWNSGALTSGVHTFPAVLQSSGLYSLSSVVTVPSSSLGTKTYTCNVDHKPSNTKVDKRVESKYGPPCPPCPAPEFLGGPSVFLFPPKPKDTLMISRTPEVTCVVVDVSQEDPEVQFNWYVDGVEVHNAKTKPREEQFNSTYRVVSVLTVLHQDWLNGKEYKCKVSNKGLPSSIEKTISKAKGQPREPQVYTLPPSQEEMTKNQVSLTCLVKGFYPSDIAVEWESNGQPENNYKTTPPVLDSDGSFFLYSRLTVDKSRWQEGNVFSCSVMHEALHNHYTQKSLSLSLG

SEQ ID NO: 470 - protein, 443 aa, synthetic construct
  REGION 1..443: note = 13H12.2F8 heavy chain peptide sequence
QIQLVQSGPELKKPGETVKISCKASGYTFTTYGMSWVKQAPGKGLKWMGWINTYSGVPTYADDFKGRFAFSLETSASTAYLQINNLKNEDTATYFCAVPYEYDGAYWGQGTLVTVSAASTKGPSVFPLAPCSRSTSESTAALGCLVKDYFPEPVTVSWNSGALTSGVHTFPAVLQSSGLYSLSSVVTVPSSSLGTKTYTCNVDHKPSNTKVDKRVESKYGPPCPPCPAPEFLGGPSVFLFPPKPKDTLMISRTPEVTCVVVDVSQEDPEVQFNWYVDGVEVHNAKTKPREEQFNSTYRVVSVLTVLHQDWLNGKEYKCKVSNKGLPSSIEKTISKAKGQPREPQVYTLPPSQEEMTKNQVSLTCLVKGFYPSDIAVEWESNGQPENNYKTTPPVLDSDGSFFLYSRLTVDKSRWQEGNVFSCSVMHEALHNHYTQKSLSLSLG

SEQ ID NO: 471 - protein, 441 aa, synthetic construct
  REGION 1..441: note = 15G7.2A7 heavy chain peptide sequence
EVQLQQSGPELVKPGASVKISCKASGYTFTDYYMNWVKQSHGKSLEWIGDINPNNGGTNYNQKFKGKATLTVDKSSSTAYMELRSLTSEDSAVYYCTSGYGFPYWGQGTLVTVSAASTKGPSVFPLAPCSRSTSESTAALGCLVKDYFPEPVTVSWNSGALTSGVHTFPAVLQSSGLYSLSSVVTVPSSSLGTKTYTCNVDHKPSNTKVDKRVESKYGPPCPPCPAPEFLGGPSVFLFPPKPKDTLMISRTPEVTCVVVDVSQEDPEVQFNWYVDGVEVHNAKTKPREEQFNSTYRVVSVLTVLHQDWLNGKEYKCKVSNKGLPSSIEKTISKAKGQPREPQVYTLPPSQEEMTKNQVSLTCLVKGFYPSDIAVEWESNGQPENNYKTTPPVLDSDGSFFLYSRLTVDKSRWQEGNVFSCSVMHEALHNHYTQKSLSLSLG

SEQ ID NO: 472 - protein, 443 aa, synthetic construct
  REGION 1..443: note = 19D9.2E5 heavy chain peptide sequence
QIQLVQSGPELKKPGETVKISCKASGYTFTTYGMGWVKQAPGKGLKWMGWINTYSGVPTYADDFKGRFAFSLETSTSTAYLQINNLKNEDMATYFCATPYEYDGAYWGQGTLVTVSAASTKGPSVFPLAPCSRSTSESTAALGCLVKDYFPEPVTVSWNSGALTSGVHTFPAVLQSSGLYSLSSVVTVPSSSLGTKTYTCNVDHKPSNTKVDKRVESKYGPPCPPCPAPEFLGGPSVFLFPPKPKDTLMISRTPEVTCVVVDVSQEDPEVQFNWYVDGVEVHNAKTKPREEQFNSTYRVVSVLTVLHQDWLNGKEYKCKVSNKGLPSSIEKTISKAKGQPREPQVYTLPPSQEEMTKNQVSLTCLVKGFYPSDIAVEWESNGQPENNYKTTPPVLDSDGSFFLYSRLTVDKSRWQEGNVFSCSVMHEALHNHYTQKSLSLSLG

SEQ ID NO: 473 - protein, 438 aa, synthetic construct
  REGION 1..438: note = 23B10.2B12 heavy chain peptide sequence
QVQLQQSGPELVKPGDSVKISCKAAGYTFSDYYINWVKQRPGQGLEWIGWIYPVSVNTKYNEKFKGKATLTVDTSSSTAYMQLSSLTSEDSGVYFCAYLDYWGQGTLVTVSAASTKGPSVFPLAPCSRSTSESTAALGCLVKDYFPEPVTVSWNSGALTSGVHTFPAVLQSSGLYSLSSVVTVPSSSLGTKTYTCNVDHKPSNTKVDKRVESKYGPPCPPCPAPEFLGGPSVFLFPPKPKDTLMISRTPEVTCVVVDVSQEDPEVQFNWYVDGVEVHNAKTKPREEQFNSTYRVVSVLTVLHQDWLNGKEYKCKVSNKGLPSSIEKTISKAKGQPREPQVYTLPPSQEEMTKNQVSLTCLVKGFYPSDIAVEWESNGQPENNYKTTPPVLDSDGSFFLYSRLTVDKSRWQEGNVFSCSVMHEALHNHYTQKSLSLSLG

SEQ ID NO: 474 - protein, 446 aa, synthetic construct
  REGION 1..446: note = 24D12.2H9 heavy chain peptide sequence
QVQLKQSGPGLVQPSQSLSITCTVSGFSLTSYGVHWVRQAPGKGLEWLGVIWSGGSTDYNAAFMSRLSISKDNSKSQVFFKMNSLQADDTAIYYCAKSPDGYDVAWFGYWGQGTLVTVSAASTKGPSVFPLAPCSRSTSESTAALGCLVKDYFPEPVTVSWNSGALTSGVHTFPAVLQSSGLYSLSSVVTVPSSSLGTKTYTCNVDHKPSNTKVDKRVESKYGPPCPPCPAPEFLGGPSVFLFPPKPKDTLMISRTPEVTCVVVDVSQEDPEVQFNWYVDGVEVHNAKTKPREEQFNSTYRVVSVLTVLHQDWLNGKEYKCKVSNKGLPSSIEKTISKAKGQPREPQVYTLPPSQEEMTKNQVSLTCLVKGFYPSDIAVEWESNGQPENNYKTTPPVLDSDGSFFLYSRLTVDKSRWQEGNVFSCSVMHEALHNHYTQKSLSLSLG

SEQ ID NO: 475 - protein, 448 aa, synthetic construct
  REGION 1..448: note = F846C.1B2 heavy chain peptide sequence
QIQLVQSGPELKKPGETVKISCKASGYTFTNYGMNWVKQAPGKGLKWMGWINTYTGEPSYADDFKGRFAFSLETSASTAYLQINNLKNEDMATYFCARWGGYAGDYYAMDFWGQGTSVTVSSASTKGPSVFPLAPCSRSTSESTAALGCLVKDYFPEPVTVSWNSGALTSGVHTFPAVLQSSGLYSLSSVVTVPSSSLGTKTYTCNVDHKPSNTKVDKRVESKYGPPCPPCPAPEFLGGPSVFLFPPKPKDTLMISRTPEVTCVVVDVSQEDPEVQFNWYVDGVEVHNAKTKPREEQFNSTYRVVSVLTVLHQDWLNGKEYKCKVSNKGLPSSIEKTISKAKGQPREPQVYTLPPSQEEMTKNQVSLTCLVKGFYPSDIAVEWESNGQPENNYKTTPPVLDSDGSFFLYSRLTVDKSRWQEGNVFSCSVMHEALHNHYTQKSLSLSLG

SEQ ID NO: 476 - protein, 448 aa, synthetic construct
  REGION 1..448: note = F846C.1F5 heavy chain peptide sequence
QIQLVQSGPELKKPGETVKISCKASGYTFTNYGMNWVKQAPGKGLKWMGWINTYTGEPSYADDFKGRFAFSLETSASTAYLQINNLKNEDMATYFCARWGGYDGDYYAMDYWGQGTSVTVSSASTKGPSVFPLAPCSRSTSESTAALGCLVKDYFPEPVTVSWNSGALTSGVHTFPAVLQSSGLYSLSSVVTVPSSSLGTKTYTCNVDHKPSNTKVDKRVESKYGPPCPPCPAPEFLGGPSVFLFPPKPKDTLMISRTPEVTCVVVDVSQEDPEVQFNWYVDGVEVHNAKTKPREEQFNSTYRVVSVLTVLHQDWLNGKEYKCKVSNKGLPSSIEKTISKAKGQPREPQVYTLPPSQEEMTKNQVSLTCLVKGFYPSDIAVEWESNGQPENNYKTTPPVLDSDGSFFLYSRLTVDKSRWQEGNVFSCSVMHEALHNHYTQKSLSLSLG

SEQ ID NO: 477 - protein, 448 aa, synthetic construct
  REGION 1..448: note = F846C.1H12 heavy chain peptide sequence
QIQLVQSGPELKKPGETVKISCKASGYTFTNFGMNWVKQAPGKGLKWMGWINTYTGEPSYADDFKGRFAFSLETSASTAYLQINNLKNEDIATYFCARWGGYAGDYYAMDYWGQGTSVTVSSASTKGPSVFPLAPCSRSTSESTAALGCLVKDYFPEPVTVSWNSGALTSGVHTFPAVLQSSGLYSLSSVVTVPSSSLGTKTYTCNVDHKPSNTKVDKRVESKYGPPCPPCPAPEFLGGPSVFLFPPKPKDTLMISRTPEVTCVVVDVSQEDPEVQFNWYVDGVEVHNAKTKPREEQFNSTYRVVSVLTVLHQDWLNGKEYKCKVSNKGLPSSIEKTISKAKGQPREPQVYTLPPSQEEMTKNQVSLTCLVKGFYPSDIAVEWESNGQPENNYKTTPPVLDSDGSFFLYSRLTVDKSRWQEGNVFSCSVMHEALHNHYTQKSLSLSLG

SEQ ID NO: 478 - protein, 442 aa, synthetic construct
  REGION 1..442: note = F846C.1H5 heavy chain peptide sequence
EVQLLESGGGLVKPGGSLKLSCAASGFTFSSYAMSWVRQTPEKRLEWVASISSGGDTYYPDSVKGRFTISRDNARNILYLQMSSLRSEDTAMYYCASYGNSLFDYWGQGTTLTVSSASTKGPSVFPLAPCSRSTSESTAALGCLVKDYFPEPVTVSWNSGALTSGVHTFPAVLQSSGLYSLSSVVTVPSSSLGTKTYTCNVDHKPSNTKVDKRVESKYGPPCPPCPAPEFLGGPSVFLFPPKPKDTLMISRTPEVTCVVVDVSQEDPEVQFNWYVDGVEVHNAKTKPREEQFNSTYRVVSVLTVLHQDWLNGKEYKCKVSNKGLPSSIEKTISKAKGQPREPQVYTLPPSQEEMTKNQVSLTCLVKGFYPSDIAVEWESNGQPENNYKTTPPVLDSDGSFFLYSRLTVDKSRWQEGNVFSCSVMHEALHNHYTQKSLSLSLG

SEQ ID NO: 479 - protein, 448 aa, synthetic construct; identical to SEQ ID NO: 476
  REGION 1..448: note = F846C.2H3 heavy chain peptide sequence

SEQ ID NO: 480 - protein, 440 aa, synthetic construct
  REGION 1..440: note = F846TC.14A2 heavy chain peptide sequence
QIQLVQSGPELKKPGETVKISCKASGYTFTNYGMNWVKQAPGKGLKWMGWINTYTGEPTYAGDLKGRFAFSLETSASTAYLQINNLKNEDTATYFCVRYTMDYWGQGTSVTVSSASTKGPSVFPLAPCSRSTSESTAALGCLVKDYFPEPVTVSWNSGALTSGVHTFPAVLQSSGLYSLSSVVTVPSSSLGTKTYTCNVDHKPSNTKVDKRVESKYGPPCPPCPAPEFLGGPSVFLFPPKPKDTLMISRTPEVTCVVVDVSQEDPEVQFNWYVDGVEVHNAKTKPREEQFNSTYRVVSVLTVLHQDWLNGKEYKCKVSNKGLPSSIEKTISKAKGQPREPQVYTLPPSQEEMTKNQVSLTCLVKGFYPSDIAVEWESNGQPENNYKTTPPVLDSDGSFFLYSRLTVDKSRWQEGNVFSCSVMHEALHNHYTQKSLSLSLG

SEQ ID NO: 481 - protein, 450 aa, synthetic construct
  REGION 1..450: note = F846TC.14E4 heavy chain peptide sequence
QVTLKESGPGILQPSQTLSLTCSFSGFSLSTSGMGVGWIRQPSGKGLEWLAHIWWDDDKYYNTALKSGLTISKDASKNQVFLKIASMDTADTATYYCARNLYDGSYGYYAMDYWGQGTSVTVSSASTKGPSVFPLAPCSRSTSESTAALGCLVKDYFPEPVTVSWNSGALTSGVHTFPAVLQSSGLYSLSSVVTVPSSSLGTKTYTCNVDHKPSNTKVDKRVESKYGPPCPPCPAPEFLGGPSVFLFPPKPKDTLMISRTPEVTCVVVDVSQEDPEVQFNWYVDGVEVHNAKTKPREEQFNSTYRVVSVLTVLHQDWLNGKEYKCKVSNKGLPSSIEKTISKAKGQPREPQVYTLPPSQEEMTKNQVSLTCLVKGFYPSDIAVEWESNGQPENNYKTTPPVLDSDGSFFLYSRLTVDKSRWQEGNVFSCSVMHEALHNHYTQKSLSLSLG

SEQ ID NO: 482 - protein, 448 aa, synthetic construct
  REGION 1..448: note = F846TC.16B5 heavy chain peptide sequence
QIQLVQSGPELKKPGETVKISCKASGYTFTNYGMNWVKQAPGKGLKWMGWINTYTGEPAYADDFKGRFAFSLETSASTAYLQINNLKNEDMATYFCARWGGYDGDYYAMDYWGQGTSVTVSSASTKGPSVFPLAPCSRSTSESTAALGCLVKDYFPEPVTVSWNSGALTSGVHTFPAVLQSSGLYSLSSVVTVPSSSLGTKTYTCNVDHKPSNTKVDKRVESKYGPPCPPCPAPEFLGGPSVFLFPPKPKDTLMISRTPEVTCVVVDVSQEDPEVQFNWYVDGVEVHNAKTKPREEQFNSTYRVVSVLTVLHQDWLNGKEYKCKVSNKGLPSSIEKTISKAKGQPREPQVYTLPPSQEEMTKNQVSLTCLVKGFYPSDIAVEWESNGQPENNYKTTPPVLDSDGSFFLYSRLTVDKSRWQEGNVFSCSVMHEALHNHYTQKSLSLSLG

SEQ ID NO: 483 - protein, 449 aa, synthetic construct
  REGION 1..449: note = F846TC.7F10 heavy chain peptide sequence
EVQLVESGGDLVKPGGSLKLSCAASGFTFSNYGLSWIRQTPDKRLEWVATISSGGSYTYYPDSVKGRFTISRDSAKNTLYLQMSSLKSEDTAMYYCARHAHYYGVSPYYFDYWGQGTCLTVSSASTKGPSVFPLAPCSRSTSESTAALGCLVKDYFPEPVTVSWNSGALTSGVHTFPAVLQSSGLYSLSSVVTVPSSSLGTKTYTCNVDHKPSNTKVDKRVESKYGPPCPPCPAPEFLGGPSVFLFPPKPKDTLMISRTPEVTCVVVDVSQEDPEVQFNWYVDGVEVHNAKTKPREEQFNSTYRVVSVLTVLHQDWLNGKEYKCKVSNKGLPSSIEKTISKAKGQPREPQVYTLPPSQEEMTKNQVSLTCLVKGFYPSDIAVEWESNGQPENNYKTTPPVLDSDGSFFLYSRLTVDKSRWQEGNVFSCSVMHEALHNHYTQKSLSLSLG

SEQ ID NO: 484 - protein, 445 aa, synthetic construct
  REGION 1..445: note = F847C.10B9 heavy chain peptide sequence
QIQLVQSGPEVKKPGETVKISCKASGYIFTNYGMNWVKQAPGKGLKWMGWINTYTGEPTYTDDFKGRFAFSLETSASTAYLQINNLKNEDTATYFCAKFGNYVGAMDYWGQGTSVTVSSASTKGPSVFPLAPCSRSTSESTAALGCLVKDYFPEPVTVSWNSGALTSGVHTFPAVLQSSGLYSLSSVVTVPSSSLGTKTYTCNVDHKPSNTKVDKRVESKYGPPCPPCPAPEFLGGPSVFLFPPKPKDTLMISRTPEVTCVVVDVSQEDPEVQFNWYVDGVEVHNAKTKPREEQFNSTYRVVSVLTVLHQDWLNGKEYKCKVSNKGLPSSIEKTISKAKGQPREPQVYTLPPSQEEMTKNQVSLTCLVKGFYPSDIAVEWESNGQPENNYKTTPPVLDSDGSFFLYSRLTVDKSRWQEGNVFSCSVMHEALHNHYTQKSLSLSLG

SEQ ID NO: 485 - protein, 446 aa, synthetic construct
  REGION 1..446: note = F847C.11B1 heavy chain peptide sequence
EVQLQQSGPELVKPGASVKISCKASGNTFTDHNMHWVKQSHGKSLEWIGYIYPYNGGTGYNQKFKSKATLTVDNSSSTVYMELRSLTSEDSAVYYCARGEYDYLAWFAYWGQGTLVTVSAASTKGPSVFPLAPCSRSTSESTAALGCLVKDYFPEPVTVSWNSGALTSGVHTFPAVLQSSGLYSLSSVVTVPSSSLGTKTYTCNVDHKPSNTKVDKRVESKYGPPCPPCPAPEFLGGPSVFLFPPKPKDTLMISRTPEVTCVVVDVSQEDPEVQFNWYVDGVEVHNAKTKPREEQFNSTYRVVSVLTVLHQDWLNGKEYKCKVSNKGLPSSIEKTISKAKGQPREPQVYTLPPSQEEMTKNQVSLTCLVKGFYPSDIAVEWESNGQPENNYKTTPPVLDSDGSFFLYSRLTVDKSRWQEGNVFSCSVMHEALHNHYTQKSLSLSLG

SEQ ID NO: 486 - protein, 445 aa, synthetic construct
  REGION 1..445: note = F847C.12F12 heavy chain peptide sequence
QIQLVQSGPELKKPGETVKISCKASGYTFTNYGMNWVKQAPGKGLKWMGWINTYTGEPTYVDDFKGRFAFSLETSASTAYLRINNLKNEDTATYFCAKFGNYVGAMDYWGQGTSVTVSSASTKGPSVFPLAPCSRSTSESTAALGCLVKDYFPEPVTVSWNSGALTSGVHTFPAVLQSSGLYSLSSVVTVPSSSLGTKTYTCNVDHKPSNTKVDKRVESKYGPPCPPCPAPEFLGGPSVFLFPPKPKDTLMISRTPEVTCVVVDVSQEDPEVQFNWYVDGVEVHNAKTKPREEQFNSTYRVVSVLTVLHQDWLNGKEYKCKVSNKGLPSSIEKTISKAKGQPREPQVYTLPPSQEEMTKNQVSLTCLVKGFYPSDIAVEWESNGQPENNYKTTPPVLDSDGSFFLYSRLTVDKSRWQEGNVFSCSVMHEALHNHYTQKSLSLSLG

SEQ ID NO: 487 - protein, 445 aa, synthetic construct; identical to SEQ ID NO: 484
  REGION 1..445: note = F847C.26F5 heavy chain peptide sequence

SEQ ID NO: 488 - protein, 443 aa, synthetic construct
  REGION 1..443: note = F847C.4B10 heavy chain peptide sequence
EVQLVETGGGLVKPGGSLKLSCAASGFTFSSYAMSWVRQTPEKRLEWVASISSGGSTYYPDSVKGRFTISRDNARNILYLQMSSLRSEDTAMYYCTRFTTVVEMDYWGQGTSVTVSSASTKGPSVFPLAPCSRSTSESTAALGCLVKDYFPEPVTVSWNSGALTSGVHTFPAVLQSSGLYSLSSVVTVPSSSLGTKTYTCNVDHKPSNTKVDKRVESKYGPPCPPCPAPEFLGGPSVFLFPPKPKDTLMISRTPEVTCVVVDVSQEDPEVQFNWYVDGVEVHNAKTKPREEQFNSTYRVVSVLTVLHQDWLNGKEYKCKVSNKGLPSSIEKTISKAKGQPREPQVYTLPPSQEEMTKNQVSLTCLVKGFYPSDIAVEWESNGQPENNYKTTPPVLDSDGSFFLYSRLTVDKSRWQEGNVFSCSVMHEALHNHYTQKSLSLSLG

SEQ ID NO: 489 - protein, 438 aa, synthetic construct
  REGION 1..438: note = F849C.8D10 heavy chain peptide sequence
QVQLQQTGAELVKPGASVKLSCKASGYTFTSYWINWVKQRPGQGLEWIGNIYPGSSSIYYSEKFKSKATLTVDTSSSTAYMQLSSLTSDDSAVYYCARWGYWGQGTTLTVSSASTKGPSVFPLAPCSRSTSESTAALGCLVKDYFPEPVTVSWNSGALTSGVHTFPAVLQSSGLYSLSSVVTVPSSSLGTKTYTCNVDHKPSNTKVDKRVESKYGPPCPPCPAPEFLGGPSVFLFPPKPKDTLMISRTPEVTCVVVDVSQEDPEVQFNWYVDGVEVHNAKTKPREEQFNSTYRVVSVLTVLHQDWLNGKEYKCKVSNKGLPSSIEKTISKAKGQPREPQVYTLPPSQEEMTKNQVSLTCLVKGFYPSDIAVEWESNGQPENNYKTTPPVLDSDGSFFLYSRLTVDKSRWQEGNVFSCSVMHEALHNHYTQKSLSLSLG

SEQ ID NO: 490 - protein, 447 aa, synthetic construct
  REGION 1..447: note = F849C.8H3 heavy chain peptide sequence
QVTLKESGPGILQPSQTLSLTCSFSGFSLSTFGMGVGWIRQPSGKGLEWLAHIWWDDDKHYNPALKSRLTISKDTSKNQVFLRIANVDTADNATYYCARIDYGDYVGFAYWGQGTLVTVSAASTKGPSVFPLAPCSRSTSESTAALGCLVKDYFPEPVTVSWNSGALTSGVHTFPAVLQSSGLYSLSSVVTVPSSSLGTKTYTCNVDHKPSNTKVDKRVESKYGPPCPPCPAPEFLGGPSVFLFPPKPKDTLMISRTPEVTCVVVDVSQEDPEVQFNWYVDGVEVHNAKTKPREEQFNSTYRVVSVLTVLHQDWLNGKEYKCKVSNKGLPSSIEKTISKAKGQPREPQVYTLPPSQEEMTKNQVSLTCLVKGFYPSDIAVEWESNGQPENNYKTTPPVLDSDGSFFLYSRLTVDKSRWQEGNVFSCSVMHEALHNHYTQKSLSLSLG

SEQ ID NO: 491 - protein, 444 aa, synthetic construct
  REGION 1..444: note = 846.2B11 heavy chain peptide sequence
QVQLQQSGPELVRPGALVKISCKASGYTFTSYDINWVKQRPGQGLEWIGWIYPGDGSTKYNEKFKGKATLTADKSSSTAYMQLSSLTSENSAVYFCAREAASNAMDYWGQGTSVTVSSASTKGPSVFPLAPCSRSTSESTAALGCLVKDYFPEPVTVSWNSGALTSGVHTFPAVLQSSGLYSLSSVVTVPSSSLGTKTYTCNVDHKPSNTKVDKRVESKYGPPCPPCPAPEFLGGPSVFLFPPKPKDTLMISRTPEVTCVVVDVSQEDPEVQFNWYVDGVEVHNAKTKPREEQFNSTYRVVSVLTVLHQDWLNGKEYKCKVSNKGLPSSIEKTISKAKGQPREPQVYTLPPSQEEMTKNQVSLTCLVKGFYPSDIAVEWESNGQPENNYKTTPPVLDSDGSFFLYSRLTVDKSRWQEGNVFSCSVMHEALHNHYTQKSLSLSLG

SEQ ID NO: 492 - protein, 448 aa, synthetic construct
  REGION 1..448: note = 846.4D5 heavy chain peptide sequence
EVKLEESGGGLVQPGGSMKLSCVASGFTFSNYWMNWVRQSPEKGLEWVAEIRLKSNNYATHYAESVKGRFTISRDDSKSSVYLQMNNLRAEDTGIYYCTRHYGFPYWYFDVWGAGTTVTVSSASTKGPSVFPLAPCSRSTSESTAALGCLVKDYFPEPVTVSWNSGALTSGVHTFPAVLQSSGLYSLSSVVTVPSSSLGTKTYTCNVDHKPSNTKVDKRVESKYGPPCPPCPAPEFLGGPSVFLFPPKPKDTLMISRTPEVTCVVVDVSQEDPEVQFNWYVDGVEVHNAKTKPREEQFNSTYRVVSVLTVLHQDWLNGKEYKCKVSNKGLPSSIEKTISKAKGQPREPQVYTLPPSQEEMTKNQVSLTCLVKGFYPSDIAVEWESNGQPENNYKTTPPVLDSDGSFFLYSRLTVDKSRWQEGNVFSCSVMHEALHNHYTQKSLSLSLG

SEQ ID NO: 493 - protein, 444 aa, synthetic construct
  REGION 1..444: note = 846T.1H2 heavy chain peptide sequence
QIQLVQSGPELKKPGETVKISCKASGYTFTNYGMNWVKQAPGKGLKWMGWINTNTGEPTYAEEFKGRFAFSLETSASTAYLQINNLKNEDTATYFCATGGGNWDFDYWGQGTTLTVSSASTKGPSVFPLAPCSRSTSESTAALGCLVKDYFPEPVTVSWNSGALTSGVHTFPAVLQSSGLYSLSSVVTVPSSSLGTKTYTCNVDHKPSNTKVDKRVESKYGPPCPPCPAPEFLGGPSVFLFPPKPKDTLMISRTPEVTCVVVDVSQEDPEVQFNWYVDGVEVHNAKTKPREEQFNSTYRVVSVLTVLHQDWLNGKEYKCKVSNKGLPSSIEKTISKAKGQPREPQVYTLPPSQEEMTKNQVSLTCLVKGFYPSDIAVEWESNGQPENNYKTTPPVLDSDGSFFLYSRLTVDKSRWQEGNVFSCSVMHEALHNHYTQKSLSLSLG

SEQ ID NO: 494 - protein, 440 aa, synthetic construct
  REGION 1..440: note = 847.14H4 heavy chain peptide sequence
QIQLVQSGPELTKPGETVKISCKASGYTFTDYGMNWVRQAPGETLKWMGWINTYTGEPTYADDFKGRFAFSLESSASTAYLQINNLKNEDVATYFCARYPMDYWGQGTSVTVSSASTKGPSVFPLAPCSRSTSESTAALGCLVKDYFPEPVTVSWNSGALTSGVHTFPAVLQSSGLYSLSSVVTVPSSSLGTKTYTCNVDHKPSNTKVDKRVESKYGPPCPPCPAPEFLGGPSVFLFPPKPKDTLMISRTPEVTCVVVDVSQEDPEVQFNWYVDGVEVHNAKTKPREEQFNSTYRVVSVLTVLHQDWLNGKEYKCKVSNKGLPSSIEKTISKAKGQPREPQVYTLPPSQEEMTKNQVSLTCLVKGFYPSDIAVEWESNGQPENNYKTTPPVLDSDGSFFLYSRLTVDKSRWQEGNVFSCSVMHEALHNHYTQKSLSLSLG

SEQ ID NO: 495 - protein, 219 aa, synthetic construct
  REGION 1..219: note = TB001 light chain peptide sequence
DIVLTQSPLSLPVTPGEPASISCRSSKSLLYKDGKTYLNWFLQKPGQSPQLLIYLMSTHASGVPDRFSGSGSGTDFTLKISRVEAEDVGVYYCQQLVDYPLTFGGGTKLEIKRTVAAPSVFIFPPSDEQLKSGTASVVCLLNNFYPREAKVQWKVDNALQSGNSQESVTEQDSKDSTYSLSSTLTLSKADYEKHKVYACEVTHQGLSSPVTKSFNRGEC

SEQ ID NO: 496 - protein, 219 aa, synthetic construct
  REGION 1..219: note = TB006 light chain peptide sequence
DIVMTQTPLSLSVTPGQPASISCKSSKSLLHSDGITYLYWYLQKPGQSPQLLIYRMSNLASGVPDRFSGSGSGTDFTLKISRVEAEDVGVYYCAQMLEFPLTFGQGTKLEIKRTVAAPSVFIFPPSDEQLKSGTASVVCLLNNFYPREAKVQWKVDNALQSGNSQESVTEQDSKDSTYSLSSTLTLSKADYEKHKVYACEVTHQGLSSPVTKSFNRGEC

SEQ ID NO: 497 - protein, 214 aa, synthetic construct
  REGION 1..214: note = 12G5.D7 light chain peptide sequence
DILMTQSPSSMSVSLGDTVSITCHASQGINSNMGWLQQKPGKSFKGLIYHATNLEDGVPSRFSGSGSGADYSLTISSLESEDFADYYCVQYAQFPPTFGSGTKLEIKRADVAPTVSIFPPSSEQLTSGGASVVCFLNNFYPKDINVKWKIDGSERQNGVLNSWTDQDSKDSTYSMSSTLTLTKDEYERHNSYTCEATHKTSTSPIVKSFNRNEC

SEQ ID NO: 498 - protein, 219 aa, synthetic construct
  REGION 1..219: note = 13A12.2E5 light chain peptide sequence
DVVMTQTPLTLSVAIGQPASISCKSSQSLLYTNGKTYLNWLLQRPGQSPKRLIYLLSKLDSGVPDRFSASGSGTDFTLKISRVEAEDLGVYYCLQSTHFPLTFGAGTKLEMKRADVAPTVSIFPPSSEQLTSGGASVVCFLNNFYPKDINVKWKIDGSERQNGVLNSWTDQDSKDSTYSMSSTLTLTKDEYERHNSYTCEATHKTSTSPIVKSFNRNEC

SEQ ID NO: 499 - protein, 219 aa, synthetic construct
  REGION 1..219: note = 14H10.2C9 light chain peptide sequence
DVVMTQTPLTLSVTIGQPASISCKSSQSLFDSDGKTYLNWLLQRPGQSPKRLIYLVSKLDSGVPDRFTGSGSGTDFTLKISRVEAEDLGVYYCWQGTHFPLTFGAGTKLEMKRADVAPTVSIFPPSSEQLTSGGASVVCFLNNFYPKDINVKWKIDGSERQNGVLNSWTDQDSKDSTYSMSSTLTLTKDEYERHNSYTCEATHKTSTSPIVKSFNRNEC

SEQ ID NO: 500 - protein, 219 aa, synthetic construct
  REGION 1..219: note = 15F10.2D6 light chain peptide sequence
DVLMTQTPLSLPVSLGDQASISCRSSQSIVHNNGNTYLEWYLQKPGQSPKLLIYKVSNRFSGVPDRFSGSGSGTDFTLKISRVEAEDLGVYYCFQGSHVPLTFGGGTKLELKRADVAPTVSIFPPSSEQLTSGGASVVCFLNNFYPKDINVKWKIDGSERQNGVLNSWTDQDSKDSTYSMSSTLTLTKDEYERHNSYTCEATHKTSTSPIVKSFNRNEC

SEQ ID NO: 501 - protein, 214 aa, synthetic construct
  REGION 1..214: note = 19B5.2E6/23H9.2E4 light chain peptide sequence
DIQMTQTTSSLSASLGDRVTISCSASQGINNYLNWYQQKPDGTVKLLIYYASSLHSGVPSRFSGSGSGTDYSLTISNLEPEDIATYYCQQYSQVPYTFGSGTKLEIKRADVAPTVSIFPPSSEQLTSGGASVVCFLNNFYPKDINVKWKIDGSERQNGVLNSWTDQDSKDSTYSMSSTLTLTKDEYERHNSYTCEATHKTSTSPIVKSFNRNEC

SEQ ID NO: 502 - protein, 214 aa, synthetic construct
  REGION 1..214: note = 20D11.2C6 light chain peptide sequence
DIQMNQSPSSLSASLGDTITITCRASQNIYIWLSWYQQKPGNIPKLLIYKASNLHTGVPSRFSGSGSGTDFTLTISTLQPEDIATYFCLQGQSYPLTFGAGTKLEMKRADVAPTVSIFPPSSEQLTSGGASVVCFLNNFYPKDINVKWKIDGSERQNGVLNSWTDQDSKDSTYSMSSTLTLTKDEYERHNSYTCEATHKTSTSPIVKSFNRNEC

SEQ ID NO: 503 - protein, 214 aa, synthetic construct
  REGION 1..214: note = 20H5.A3 light chain peptide sequence
DIQMTQTTSSLSASLGDRVTINCSASQDISNYLNWYQQKPDGTVKLLIYYTSSLLSGVPSRFSGSGSGTDYSLTISNLEPEDIATYFCQQYSKLPYTFGSGTHLEIKRADVAPTVSIFPPSSEQLTSGGASVVCFLNNFYPKDINVKWKIDGSERQNGVLNSWTDQDSKDSTYSMSSTLTLTKDEYERHNSYTCEATHKTSTSPIVKSFNRNEC

SEQ ID NO: 504 - protein, 219 aa, synthetic construct
  REGION 1..219: note = 2D10.2B2 light chain peptide sequence
DIVMTQAAFSNPVTLGTSASISCRSSKSLLHSDGITYLYWYLQRPGQSPQLLIYRMSNLASGVPDRFSGSGSGTDFTLRISRVEAEDVGVYYCAQMIEFPLTFGAGTILELKRADVAPTVSIFPPSSEQLTSGGASVVCFLNNFYPKDINVKWKIDGSERQNGVLNSWTDQDSKDSTYSMSSTLTLTKDEYERHNSYTCEATHKTSTSPIVKSFNRNEC

SEQ ID NO: 505 - protein, 219 aa, synthetic construct
  REGION 1..219: note = 3B11.2G2 light chain peptide sequence
DVVMTQTPLTLSVAIGQPASISCKSSQSLLYTNGKTYLNWLLQRPGQSPKRLIYLVSKLDSGVPDRFSGSGSGTDFTLKISRVEAEDLGVYYCLQSTHFPLTFGAGTKLELKRADVAPTVSIFPPSSEQLTSGGASVVCFLNNFYPKDINVKWKIDGSERQNGVLNSWTDQDSKDSTYSMSSTLTLTKDEYERHNSYTCEATHKTSTSPIVKSFNRNEC

SEQ ID NO: 506 - protein, 219 aa, synthetic construct
  REGION 1..219: note = 7D8.2D8 light chain peptide sequence
DVLMTQTPLSLPVSLGDQASISCRSSQSIVHSNGNTYLEWYLQKPGQSPKLLIYKVSNRFSGVPDRFSGSGSGTDFTLKISRVEAEDLGVYYCFQGSHVPLTFGAGTKLELKRADVAPTVSIFPPSSEQLTSGGASVVCFLNNFYPKDINVKWKIDGSERQNGVLNSWTDQDSKDSTYSMSSTLTLTKDEYERHNSYTCEATHKTSTSPIVKSFNRNEC

SEQ ID NO: 507 - protein, 219 aa, synthetic construct
  REGION 1..219: note = mTB001 light chain peptide sequence
DIVITQDELSNPVTSGESVSISCRSSKSLLYKDGKTYLNWFLQRPGQSPQLLIYLMSTHASGVSDRFSGSGSGTDFTLEISRVKAEDVGVYYCQQLVDYPLTFGAGTKLELKRADVAPTVSIFPPSSEQLTSGGASVVCFLNNFYPKDINVKWKIDGSERQNGVLNSWTDQDSKDSTYSMSSTLTLTKDEYERHNSYTCEATHKTSTSPIVKSFNRNEC

SEQ ID NO: 508 - protein, 219 aa, synthetic construct
  REGION 1..219: note = 4A11.2B5 light chain peptide sequence
DIVMTQAAFSNPVTLGTSASISCRSSKSLLHSDGITYLYWYLQRPGQSPQLLIYRMSNLASGVPDRFSGSGSGTDFTLRISRVEAEDVGVYYCAQMLEFPLTFGAGTKLELKRTVAAPSVFIFPPSDEQLKSGTASVVCLLNNFYPREAKVQWKVDNALQSGNSQESVTEQDSKDSTYSLSSTLTLSKADYEKHKVYACEVTHQGLSSPVTKSFNRGEC

SEQ ID NO: 509 - protein, 219 aa, synthetic construct; identical to SEQ ID NO: 496
  REGION 1..219: note = 4A11.H1L1 light chain peptide sequence

SEQ ID NO: 510 - protein, 219 aa, synthetic construct
  REGION 1..219: note = 4A11.H4L2 light chain peptide sequence
DIVMTQSPLSLPVTPGEPASISCRSSKSLLHSDGITYLYWYLQKPGQSPQLLIYRMSNLASGVPDRFSGSGSGTDFTLKISRVEAEDVGVYYCAQMLEFPLTFGQGTKLEIKRTVAAPSVFIFPPSDEQLKSGTASVVCLLNNFYPREAKVQWKVDNALQSGNSQESVTEQDSKDSTYSLSSTLTLSKADYEKHKVYACEVTHQGLSSPVTKSFNRGEC

SEQ ID NO: 511 - protein, 219 aa, synthetic construct
  REGION 1..219: note = 4G2.2G6 light chain peptide sequence
DVVMTQTPLTLSVTIGQPASISCKSSQSLLYTDGKTYLSWFLQRPGQSPKRLIYLVSKLDSGVPDRFSGSGSGTDFTLKISRVEAEDLGVYYCLQSTHFPLTFGAGTKLEVKRTVAAPSVFIFPPSDEQLKSGTASVVCLLNNFYPREAKVQWKVDNALQSGNSQESVTEQDSKDSTYSLSSTLTLSKADYEKHKVYACEVTHQGLSSPVTKSFNRGEC

SEQ ID NO: 512 - protein, 214 aa, synthetic construct
  REGION 1..214: note = 6B3.2D3 light chain peptide sequence
SIVMTQTPKFLLVSAGDRVTITCKASQSVSNDVAWYQQKPGQSPKLLIYYASNRYTGVPDRFTGSGYGTDFTFTISTVQAEDLAVYFCQQDYTSPYTFGGGTKLEIKRTVAAPSVFIFPPSDEQLKSGTASVVCLLNNFYPREAKVQWKVDNALQSGNSQESVTEQDSKDSTYSLSSTLTLSKADYEKHKVYACEVTHQGLSSPVTKSFNRGEC

SEQ ID NO: 513 - protein, 214 aa, synthetic construct
  REGION 1..214: note = 6H6.2D6 light chain peptide sequence
DIQMTQTTSSLSASLGDRVTISCSASQGISNYLNWYQQKPDGTVKLLIYYTSSLHSGVPSRFSGSGSGTDYSLTISNLEPEDIATYYCQQYSELPYTFGSGTKLEIKRTVAAPSVFIFPPSDEQLKSGTASVVCLLNNFYPREAKVQWKVDNALQSGNSQESVTEQDSKDSTYSLSSTLTLSKADYEKHKVYACEVTHQGLSSPVTKSFNRGEC

SEQ ID NO: 514 - protein, 214 aa, synthetic construct
  REGION 1..214: note = 9H2.2H10 light chain peptide sequence
DIVMTQSHKFMSTSVGDRVSITCKASQDVSTAVAWYQQKPGQSPKLLIYWASTRHTGVPDRFTGSGSGTDYTLTISSVQAEDLALYYCQQHYTTPLTFGAGTKLELKRTVAAPSVFIFPPSDEQLKSGTASVVCLLNNFYPREAKVQWKVDNALQSGNSQESVTEQDSKDSTYSLSSTLTLSKADYEKHKVYACEVTHQGLSSPVTKSFNRGEC

SEQ ID NO: 515 - protein, 214 aa, synthetic construct
  REGION 1..214: note = 13G4.2F8 light chain peptide sequence
DIVMTQSQKFMSTSVGERVSITCKASQNVGTNVAWYQQKAGQSLELLIYGASNRHTGVPDRFTGSGSGTDFTLTITNVQSEDMTNYFCEQYSNFPLTFGAGTKLELKRTVAAPSVFIFPPSDEQLKSGTASVVCLLNNFYPREAKVQWKVDNALQSGNSQESVTEQDSKDSTYSLSSTLTLSKADYEKHKVYACEVTHQGLSSPVTKSFNRGEC

SEQ ID NO: 516 - protein, 219 aa, synthetic construct
  REGION 1..219: note = 13H12.2F8 light chain peptide sequence
DVVMTQTPLTLSVTIGQPASISCKSSQSLFHSDGKTYLNWLLQRPGQSPKRLIYLVSKLDSGVPDRFTGSGSGTDFTPKISRVEDEDLGVYYCWQGTHFPLTFGAGTKLEMKRTVAAPSVFIFPPSDEQLKSGTASVVCLLNNFYPREAKVQWKVDNALQSGNSQESVTEQDSKDSTYSLSSTLTLSKADYEKHKVYACEVTHQGLSSPVTKSFNRGEC

SEQ ID NO: 517 - protein, 214 aa, synthetic construct
  REGION 1..214: note = 15G7.2A7 light chain peptide sequence
DIQMNQSPSSLSASLGDTISITCRASQNINIWLSWYQQKPGNIPQLLIYKASNLHTGVPSRFSGSGSGTDFTLTISSLQPEDIATYYCLQGQSYPLTFGAGTKLVMKRTVAAPSVFIFPPSDEQLKSGTASVVCLLNNFYPREAKVQWKVDNALQSGNSQESVTEQDSKDSTYSLSSTLTLSKADYEKHKVYACEVTHQGLSSPVTKSFNRGEC

SEQ ID NO: 518 - protein, 217 aa, synthetic construct
  REGION 1..217: note = 19D9.2E5 light chain peptide sequence
DVVMTQTPLTLSVTIGQPASISCKSSQSLLHSDGKTYLNWLLQRPGQPPKRLMYLVSTLDSGVPDRFTGSGSGTDFTLKISRVEAEDLGVYYCWQGTHFPLTFGAGTKPERTVAAPSVFIFPPSDEQLKSGTASVVCLLNNFYPREAKVQWKVDNALQSGNSQESVTEQDSKDSTYSLSSTLTLSKADYEKHKVYACEVTHQGLSSPVTKSFNRGEC

SEQ ID NO: 519 - protein, 217 aa, synthetic construct
  REGION 1..217: note = 23B10.2B12 light chain peptide sequence
DIVMTQAAFSNPVTLGTSASISCRSSKSLLHSDGITYFYWYLQRPGQSPQLLIYRMSNLASGVPDRFSGSGSGTDFTLRISRVEAEDVGVYYCAQMLEFPLTFGAGTKLERTVAAPSVFIFPPSDEQLKSGTASVVCLLNNFYPREAKVQWKVDNALQSGNSQESVTEQDSKDSTYSLSSTLTLSKADYEKHKVYACEVTHQGLSSPVTKSFNRGEC

SEQ ID NO: 520 - protein, 214 aa, synthetic construct
  REGION 1..214: note = 24D12.2H9 light chain peptide sequence
DIVMTQSHKFMSTSVGDRVSITCKASQDVRTAVAWYQQKPGQSPKLLIYWASTRHTGVPDRFTGSGSGTDFTLTLSNVQSEDLADYFCQQYSSYPWTFGGGTKLEIKRTVAAPSVFIFPPSDEQLKSGTASVVCLLNNFYPREAKVQWKVDNALQSGNSQESVTEQDSKDSTYSLSSTLTLSKADYEKHKVYACEVTHQGLSSPVTKSFNRGEC

SEQ ID NO: 521 - protein, 219 aa, synthetic construct
  REGION 1..219: note = F846C.1B2 light chain peptide sequence
NIWLTQSPSSLAVSAGEMVTMTCKSSQSVLYSSNQKNYLAWYQQKPGQSPKLLIYWASTRESGVPDRFTGSGSGTDFSLTISSVQAEDLAVYYCHQYLSSLTFGAGTKLELKRTVAAPSVFIFPPSDEQLKSGTASVVCLLNNFYPREAKVQWKVDNALQSGNSQESVTEQDSKDSTYSLSSTLTLSKADYEKHKVYACEVTHQGLSSPVTKSFNRGEC

SEQ ID NO: 522 - protein, 219 aa, synthetic construct
  REGION 1..219: note = F846C.1F5/F846C.2H3 light chain peptide sequence
NIMMTQSPSSLAVSAGEKVTMSCKSSQSVLYSSNQKNYLAWYQQKPGQSPKLLIYWASTRESGVPDRFTGSGSGTDFTLTISSVQPEDLAVYYCHQYLSSLTFGAGTKLELKRTVAAPSVFIFPPSDEQLKSGTASVVCLLNNFYPREAKVQWKVDNALQSGNSQESVTEQDSKDSTYSLSSTLTLSKADYEKHKVYACEVTHQGLSSPVTKSFNRGEC

SEQ ID NO: 523 - protein, 219 aa, synthetic construct
  REGION 1..219: note = F846C.1H12 light chain peptide sequence
NIMMTQSPSSLAVSAGQKVTMSCKSSQSVLYSSSQKNYLAWYQQKPGQSPKLLIYWASTRESGVPDRFSGSGSGTDFTLTISSVQPEDLAVYYCHQYLSSLTFGAGTKLELKRTVAAPSVFIFPPSDEQLKSGTASVVCLLNNFYPREAKVQWKVDNALQSGNSQESVTEQDSKDSTYSLSSTLTLSKADYEKHKVYACEVTHQGLSSPVTKSFNRGEC

SEQ ID NO: 524 - protein, 219 aa, synthetic construct
  REGION 1..219: note = F846C.1H5 light chain peptide sequence
DVVMTQTPLSLPVSLGDQASISCRSSQSLVHNSGNTYLHWYLQRPGQSPNLLIYKVSNRFSGVPDRFSGSGSGTDFTLKISRVAAEDLGVYFCSQSTHVPPTFGGGTKLEIKRTVAAPSVFIFPPSDEQLKSGTASVVCLLNNFYPREAKVQWKVDNALQSGNSQESVTEQDSKDSTYSLSSTLTLSKADYEKHKVYACEVTHQGLSSPVTKSFNRGEC

SEQ ID NO: 525 - protein, 216 aa, synthetic construct
  REGION 1..216: note = F846TC.14A2 light chain peptide sequence
QAVVTQESALTTSPGETVTLTCRSSTGAVTTSNYANWVQEKPDHLFTGLIGGINNRVPGVPARFSGSLIGDKAALTITGAQTEDEAIYFCALWYSNHWVFGGGTKLTVLRTVAAPSVFIFPPSDEQLKSGTASVVCLLNNFYPREAKVQWKVDNALQSGNSQESVTEQDSKDSTYSLSSTLTLSKADYEKHKVYACEVTHQGLSSPVTKSFNRGEC

SEQ ID NO: 526 - protein, 219 aa, synthetic construct
  REGION 1..219: note = F846TC.14E4 light chain peptide sequence
DIVMTQAAFSNPVTLGTSASISCRSSKSLLHTNGITFLYWYLQKPGQSPQPLIYQMSNLASGVPDRFSSSGSGTDFTLRISRVEAEDVGVYYCAQNLELPWTFGGGTKLEINRTVAAPSVFIFPPSDEQLKSGTASVVCLLNNFYPREAKVQWKVDNALQSGNSQESVTEQDSKDSTYSLSSTLTLSKADYEKHKVYACEVTHQGLSSPVTKSFNRGEC

SEQ ID NO: 527 - protein, 219 aa, synthetic construct
  REGION 1..219: note = F846TC.16B5 light chain peptide sequence
NIMMTQSPSSLAVSAGEKVTMSCKSSQSVLYSSNQKNYLAWYQQKPGQSPKLLIYWASTRESGVPDRFTGSGSGTDFTLTISSVQAEDLAVYYCHQYLSSLTFGAGTKLELKRTVAAPSVFIFPPSDEQLKSGTASVVCLLNNFYPREAKVQWKVDNALQSGNSQESVTEQDSKDSTYSLSSTLTLSKADYEKHKVYACEVTHQGLSSPVTKSFNRGEC

SEQ ID NO: 528 - protein, 220 aa, synthetic construct
  REGION 1..220: note = F846TC.7F10 light chain peptide sequence
DIVMTQSPSSLAMSVGQKVTMSCKSSQSLLNSSNQKNYLAWYQQKPGQSPKLLVYFASTRESGVPDRFIGSGSGTDFTLTISSVQAEDLADYFCQQHYSTPYTFGGGAKLEIKRTVAAPSVFIFPPSDEQLKSGTASVVCLLNNFYPREAKVQWKVDNALQSGNSQESVTEQDSKDSTYSLSSTLTLSKADYEKHKVYACEVTHQGLSSPVTKSFNRGEC

SEQ ID NO: 529 - protein, 214 aa, synthetic construct
  REGION 1..214: note = F847C.10B9 light chain peptide sequence
DIRMTQSPSSLSASLGDTITITCHASQNINVWLSWYQQKPGNIPKLLIYKASNLHTGVPSRFSGSGSGTGFTLTISSLQPEDIATYYCQQGQSYPYTFGGGTKLELKRTVAAPSVFIFPPSDEQLKSGTASVVCLLNNFYPREAKVQWKVDNALQSGNSQESVTEQDSKDSTYSLSSTLTLSKADYEKHKVYACEVTHQGLSSPVTKSFNRGEC

SEQ ID NO: 530 - protein, 214 aa, synthetic construct
  REGION 1..214: note = F847C.11B1 light chain peptide sequence
EIVLTQSPASLSVTTGEKVTIRCITSIDIDDDMNWYQQKPGEPPKLLISEGNTLRPGVPSRFSSSGYGTDFVFTIENTLSEDVADYYCLQSDNKPLTFGAGTKLELKRTVAAPSVFIFPPSDEQLKSGTASVVCLLNNFYPREAKVQWKVDNALQSGNSQESVTEQDSKDSTYSLSSTLTLSKADYEKHKVYACEVTHQGLSSPVTKSFNRGEC

SEQ ID NO: 531 - protein, 214 aa, synthetic construct
  REGION 1..214: note = F847C.12F12 light chain peptide sequence
DIQVIQSPSSLSASLGDTITITCHASQNINVWLSWYQQKPGNIPKLLIYKASNLHTGVPSRFSGSGSGTGFTLTISSLQPEDIATYYCQQGQSYPYTFGGGTKLELKRTVAAPSVFIFPPSDEQLKSGTASVVCLLNNFYPREAKVQWKVDNALQSGNSQESVTEQDSKDSTYSLSSTLTLSKADYEKHKVYACEVTHQGLSSPVTKSFNRGEC

SEQ ID NO: 532 - protein, 214 aa, synthetic construct
  REGION 1..214: note = F847C.26F5 light chain peptide sequence
EIKMNQSPSSLSASLGDTITITCHASQNINVWLSWYQQKPGNIPKLLIYKASNLHTGVPSRFSGSGSGTGFTLTISSLQPEDIATYYCQQGQSYPYTFGGGTKLELKRTVAAPSVFIFPPSDEQLKSGTASVVCLLNNFYPREAKVQWKVDNALQSGNSQESVTEQDSKDSTYSLSSTLTLSKADYEKHKVYACEVTHQGLSSPVTKSFNRGEC

SEQ ID NO: 533 - protein, 216 aa, synthetic construct
  REGION 1..216: note = F847C.4B10/847.14H4 light chain peptide sequence
QAVVTQESALTTSPGETVTLTCRSSTGAVTTSNYANWVQEKPDHLFTGLIGGTNNRAPGVPARFSGSLIGDKAALTITGAQTEDEAIYFCALWYSNHLVFGGGTKLTVLRTVAAPSVFIFPPSDEQLKSGTASVVCLLNNFYPREAKVQWKVDNALQSGNSQESVTEQDSKDSTYSLSSTLTLSKADYEKHKVYACEVTHQGLSSPVTKSFNRGEC

SEQ ID NO: 534 - protein, 219 aa, synthetic construct
  REGION 1..219: note = F849C.8D10 light chain peptide sequence
DVLMTQTPLSLPVSLGDQASISCRSSQDIVHSSGNTYLEWYLQKPGQSLKLLIYKVSNRFSGVPDRFSASGSGTDFTLKISRVEAEDLGVYYCFQGSHVPPTFGSGTKLEIKRTVAAPSVFIFPPSDEQLKSGTASVVCLLNNFYPREAKVQWKVDNALQSGNSQESVTEQDSKDSTYSLSSTLTLSKADYEKHKVYACEVTHQGLSSPVTKSFNRGEC

SEQ ID NO: 535 - protein, 219 aa, synthetic construct
  REGION 1..219: note = F849C.8H3 light chain peptide sequence
DIGMRQAAFSNPVTLGTSASISCRSSKSLLYSNGITYLYWFLQKPGQSPQLLIYQMSNLASGVPDRFSSSGSGTDFTLRISRVEADDVGVYYCAQNLELPWTFGGGTKLEIKRTVAAPSVFIFPPSDEQLKSGTASVVCLLNNFYPREAKVQWKVDNALQSGNSQESVTEQDSKDSTYSLSSTLTLSKADYEKHKVYACEVTHQGLSSPVTKSFNRGEC

SEQ ID NO: 536 - protein, 218 aa, synthetic construct
  REGION 1..218: note = 846.2B11 light chain peptide sequence
DIVLTQSPASLGVSLGQRATISCRASKSVSTSGYSYMHWYQQKPGQPPKLLIYLASILESGVPARFSGSGSGTDFTLNIHPVEEEDAAIYYCQHSRELPLTFGAGTKLELKRTVAAPSVFIFPPSDEQLKSGTASVVCLLNNFYPREAKVQWKVDNALQSGNSQESVTEQDSKDSTYSLSSTLTLSKADYEKHKVYACEVTHQGLSSPVTKSFNRGEC

SEQ ID NO: 537 - protein, 218 aa, synthetic construct
  REGION 1..218: note = 846.4D5 light chain peptide sequence
NIVLTQSPASLAVSLGQRATISCRASESVDSYGNSFMHWYQQKPGQPPKLLIYLASNLESGVPARFSGSGSRTDFTLTIDPVEADDAATYYCQQNNEDPWTFGGGTKLEIKRTVAAPSVFIFPPSDEQLKSGTASVVCLLNNFYPREAKVQWKVDNALQSGNSQESVTEQDSKDSTYSLSSTLTLSKADYEKHKVYACEVTHQGLSSPVTKSFNRGEC

SEQ ID NO: 538 - protein, 219 aa, synthetic construct
  REGION 1..219: note = 846T.1H2 light chain peptide sequence
DVVMTQTPLTLSVTIGQPASISCKSSQSLLYSNGKTYLNWLLQRPGQSPKRLIYLVSKLDSGVPDRFTGSGSGTDFTLKISRVEAEDLGVYYCVQGTHFPQTFGGGTKLEIKRTVAAPSVFIFPPSDEQLKSGTASVVCLLNNFYPREAKVQWKVDNALQSGNSQESVTEQDSKDSTYSLSSTLTLSKADYEKHKVYACEVTHQGLSSPVTKSFNRGEC

SEQ ID NO: 539 - DNA, 348 bp, synthetic construct
  misc_feature 1..348: note = TB001 VH DNA sequence
  source 1..348: mol_type = other DNA
caggtgcagctggtgcagtccggctccgagctgaaaaaacccggcgcctccgtgaaagtgtcctgcaaagcctccggctacacattcacaaactacggcatgaactgggtgaggcaggcccccggccagggcctgaaatggatgggctggatcaacacaaacacaggcgagcccacatacgtggaggagttcacaggcaggttcgtgttctccctggagacatccgtgtccacagcctacctgcagatctcctccctgaaagccgaggacacagccgtgtacttctgcgccccctacgacaacttcttcgcctactggggccagggcacaacagtgacagtgtcctcc

SEQ ID NO: 540 - DNA, 357 bp, synthetic construct
  misc_feature 1..357: note = TB006VH DNA sequence
  source 1..357: mol_type = other DNA
cagattcaattggttcagagcggctcagaactgaaaaagcctggagccagcgttaaagtgagctgtaaagccagtggatacacattcaccacttacgtcatgtcctgggttagacaggcccctggacaggggctggaatggatgggctggataaacactcactctggagtgcccacatacgccgacgactttacaggcaggttcgtgttttccctagatactagtgtgaatactgcatacttgcaaatctcttctctgaaagcagaggataccgccgtgtacttttgcacccgcgatgggaatgatggggatgccatggacaactggggccaggggacgactgtgacagtgtcttca

SEQ ID NO: 541 - DNA, 366 bp, synthetic construct
  misc_feature 1..366: note = 12G5.D7 VH DNA sequence
  source 1..366: mol_type = other DNA
caggtgcagctgaagcagtctggggctgagctggtgaggcctggggcttcagtgaagctgtcctgcaaggcttctggctacactttcactgactactatataaactgggtgaagcagaggcctggacagggacttgagtggattgcaaggatttatcctggaactggtaatactgactacaatgagaagttcaagggcagggccacactgactgcagaaaactcctccagcactgcctacatgcagctcagcagtctgacatctgaggactctgctgtctatttctgtgcaagatttgcgtattactacggtagtggagggtactttgactactggggccacggcaccactctcacagtctcctca

SEQ ID NO: 542 - DNA, 357 bp, synthetic construct
  misc_feature 1..357: note = 13A12.2E5 VH DNA sequence
  source 1..357: mol_type = other DNA
cagatccagttggtacagtctggacctgagctgaagaagcctggagagacagtcaagatctcctgcaagacttctgggtataaattcaaaacctatgtgatgagctgggtgaaacaggctccaggaaaggctttaaagtggatgggctggataaacacctactctggagtgccaacatatgctgatgacttcaagggacgatttgccttctctttggaaacctctgccagcactgcctatttggagatcatcaacctcaaaaatgaggacacggctacatatttctgtgcaagagatggtaactacggggatcctatggactactggggtcaaggaacctcagtcaccgtctcctca

SEQ ID NO: 543 - DNA, 351 bp, synthetic construct
  misc_feature 1..351: note = 14H10.2C9 VH DNA sequence
  source 1..351: mol_type = other DNA
cagatccagttggtacagtctggacctgagctgaagaagcctggagagacagtcaagatctcctgcaaggcttctgggtataccttcacaacctatggaatgggctgggtgaaacaggctccaggaaaggatttaaagtggatgggctggataaacacctactctggagtgccaacatatgctgatgacttcaagggacggtttgccttctctttggaaacctctgccagcactgcctatttgcagatcagcaacctcaaaaatgaagacacggctacatatttctgttcaaccccttatgaatacgacggggcttactggggccaggggactctggtcactgtctctgca

SEQ ID NO: 544 - DNA, 339 bp, synthetic construct
  misc_feature 1..339: note = 15F10.2D6 VH DNA sequence
  source 1..339: mol_type = other DNA
gaagtacagctggtggagtctgggggaggcttagtgaagcctggagggtccctgaaactctcctgtgcagcctctggattcgctttcagttcctatgccatgtcttgggttcgccagactccggaaaagaggctggagtgggtcgcaaccattagtgatggtggtgtttacacctactatacagaccatgtaaagggccgattcaccatctccagagacaatgccgaggacaacctgtacctgcaaatgagccatctgaagtctgaggacacagccatgtattattgtgtgagagatgggggctactggggccaaggcaccactctcacagtctcctca

SEQ ID NO: 545 - DNA, 348 bp, synthetic construct
  misc_feature 1..348: note = 19B5.2E6 VH DNA sequence
  source 1..348: mol_type = other DNA
cagatccaacttgttcagagcgggcctgaattgaagaaaccaggcgagactgtaaagatctcctgtaaggccagtggctatacattcaccacctacgcaatgagctgggtcaagcaggcacccggaaagggtctgaagtggatgggttggataaatacatactcaggcgtcccaacctacgctgatgatttgaaggggcgctttgccttttctcttgaaacctcagcatcaaccgcctacttgcagataaataacctcaaaaatgaagacaccgctacctatttctgcgcaagggggccttatgctatggactactggggccagggcacctctgtgactgtaagttct

SEQ ID NO: 546 - DNA, 345 bp, synthetic construct
  misc_feature 1..345: note = 20D11.2C6 VH DNA sequence
  source 1..345: mol_type = other DNA
gaggtccagctgcaacaatctggacctgaactggtgaagcctggggcttcagtgaagatatcctgtaaggcttctggatacacgttcactgacttctacataaactgggtgaagcagagccatggaaagagccttgagtggattggagatattaatcctaagaatggtggtattaactacaacccgaagttcaagatcaaggccacattgactgtagacaagtcctccagcacatcctacatggacctccgcggcctgacatctgaggactctgcagtctattactgcacctcaggctacggatttccttactggggccaagggactctggtcactgtctctgca

SEQ ID NO: 547 - DNA, 348 bp, synthetic construct
  misc_feature 1..348: note = 20H5.A3 VH DNA sequence
  source 1..348: mol_type = other DNA
cagatccagttggtacagtctggacctgagctgaagaagcctggagagtcagtcaagatctcctgcaaggcttctggttatgccttcacaacctatggaatgagctgggtgcaacaggctccaggaaagggtttaaagtggatgggctgggtaaacacctactctggagtgccaacatgtgctgatgacttcaagggacggtttgccttctctttggaaacctctgccagcactgcctatttgcagatcaacaacctcagaaatgaggacacggctacatatttctgtgcaagagggccctatgctatggactactggggtcaaggaacctcagtcaccgtctcctca

SEQ ID NO: 548 - DNA, 348 bp, synthetic construct
  misc_feature 1..348: note = 23H9.2E4 VH DNA sequence
  source 1..348: mol_type = other DNA
cagatccagttggtacagtctggacctgagctgaagaagcctggagagacagtcaagatctcctgcaaggcttctgggtataccttcacaacctatgcaatgagctgggtgaaacaggctccaggaaagggtttaaagtggatgggctggataaacacctactctggagtgccaacatatgctgatgacctcaagggacggtttgccttctctttggaaacctctgccagcactgcctatttgcagatcaacaacctcaaaaatgaggacacggctacatatttctgtgcaagagggccctatgctatggactactggggtcaaggaacctcagtcaccgtctcctca

SEQ ID NO: 549 - DNA, 360 bp, synthetic construct
  misc_feature 1..360: note = 2D10-VH0-VL0 VH DNA sequence
  source 1..360: mol_type = other DNA
cagtttcagcttcaacagtctggtcctgaactcgtaaagcctggggccagtgtaaaaatatcctgtaaggcatcaggatacactttcaccgattactacatcaactgggtaaagcagcgacctggtcagggactggagtggattggctggatctaccccggatcaaatgacaccaaatacaatgagaagttcaagggcaaagctacccttacagtcgatacctcctcctccaccgcatatatgcaacttgggtcactgacttcagaggattctgcagtctatttttgcgctaattactttggatgcagcggctggtttttcgacgtgtggggaaccggaaccacagtgacagtatcctct

SEQ ID NO: 550 - DNA, 357 bp, synthetic construct
  misc_feature 1..357: note = 3B11.2G2 VH DNA sequence
  source 1..357: mol_type = other DNA
cagatccagttggtacagtctggacctgagctgaagaagcctggagagacagtcaagatctcctgcaagacttctgggtataaattcaaaacctatgtaatgagctgggtgaaacaggctccaggaaaggctttaaagtggatgggctggataaacacctactctggagtgccaacatatgctgatgacttcaagggacggtttgccttctctttggaaacctctgccagcactgcctatttggagatcatcaacctcaaaaatgaggacacggctacatatttctgtgcaagagatggtaattacggggatcctatggactactggggtcaaggaacctcagtcaccgtctcctca

SEQ ID NO: 551 - DNA, 339 bp, synthetic construct
  misc_feature 1..339: note = 7D8.2D8 VH DNA sequence
  source 1..339: mol_type = other DNA
gaagtgcagctggtggagtctgggggaggcttagtgaagcctggagggtccctgaaactctcctgtgcagcctctggattcactttcagtagctatgccatgtcttgggttcgccagactccggaaaagaggctggagtgggtcgcaaccatcagtgatggtggtatttacacctactatccagacaatgtaaagggccgattcaccatttccagagacaatgccaagaacaacctgttcctgcaaatgagccatctgaagtctgaggatacagccatgtattactgtgtaagagatgggggctactggggccaaggcaccactctcacagtctcctca

SEQ ID NO: 552 - DNA, 348 bp, synthetic construct
  misc_feature 1..348: note = mIMT001 VH DNA sequence
  source 1..348: mol_type = other DNA
cagatccaacttgtgcagtcaggtccagaattgaagaagcctggtgagaccgtcaagatttcctgtaaggcctctggttatacttttaccaactatggcatgaattgggtcaagcaggcacctgggaagggtttgaaatggatggggtggataaataccaacacaggggaaccaacttacgttgaagagtttaagggtcgttttgcattcagtcttgagacttctgcaagcacagcttacctccaaattaacaatctcaaaaatgaagatactgctacatatttctgtgctccttatgataattttttcgcctactggggacagggaactctggtcaccgtctcagca

SEQ ID NO: 553 - DNA, 348 bp, synthetic construct
  misc_feature 1..348: note = 4A11.2B5 VH DNA sequence
  source 1..348: mol_type = other DNA
caggtacaacttcagcagagcggtccagaacttgtgaagcccggtgctagtgtcaaaatatcttgcaaagcaagtggttattccttcaccaactattacatacactgggtaaaacaacgtccagggcaaggactcgaatggattggttggatctaccccggcagcggcaacactaactacaacgagaagtttaaaggcaaagctactctcacagcagacacttctagcagtacaacaaatatgcagttgtcctctctgacttccgaagacagcgccgtctattactgttctactgcacccggaggttttgacgtctggggttccggcaccacagttaccgttagttcc

SEQ ID NO: 554 - DNA, 348 bp, synthetic construct
  misc_feature 1..348: note = 4A11.H1L1 VH DNA sequence
  source 1..348: mol_type = other DNA
caggtgcagctggtgcaatcaggagccgaagttaagaagcctggcgccagcgtcaaggtctcatgtaaagcctccggttacagtttcaccaactactatatgcactgggttaggcaagcaccaggccaggggcttgagtggatgggatggatctatccagggagcggtaacaccaattacaatgagaagtttcaagggcgcgtaaccatgacagcagataccagtataagcaccgcctatatggaactctctcggttgagatccgatgataccgctgtttattactgctctaccgcacctggtggtttcgacgtttggggccaaggtactacagtgaccgtatcatca

SEQ ID NO: 555 - DNA, 348 bp, synthetic construct
  misc_feature 1..348: note = 4A11.H4L2 VH DNA sequence
  source 1..348: mol_type = other DNA
caggtgcaactggtccagtctggggccgaggtcaaaaagcctggagcctccgtcaaagtgtcatgtaaagcctcagggtatagtttcaccaactactatatacattgggtcagacaagccccaggccagcgtcttgagtggatgggatggatttatcccggatcagggaatacaaactataacgagaaatttcaaggcagagttactctcactgccgatacctctgcaagtactacctatatggagctctccagtctcagaagcgaagacacagcagtatattactgtagcaccgccccaggcgggtttgacgtgtggggccaaggcactactgtaaccgttagctca

SEQ ID NO: 556 - DNA, 357 bp, synthetic construct
  misc_feature 1..357: note = 4G2.2G6 VH DNA sequence
  source 1..357: mol_type = other DNA
caaatacagctcgtgcagtctggtcccgatttgaagaagcctggagaaaccgtaaagataagctgtaaggctagtggttacactttcacaacatacgttatgtcatgggttaaacaggctcctggaaaagaccttaaatggatgggatggattaacacccatagcggtgtcccaacttacgctgacgattttaagggacgatttgacttttctctcgaaacttctgccaacacagcttttttgcagatcaacaatctcaagaatgaagacaccgcaacctatttctgcactcgagatgggaacgacggggatgcaatggataactggggacaaggcacatcagttaccgtgagctct

SEQ ID NO: 557 - DNA, 360 bp, synthetic construct
  misc_feature 1..360: note = 6B3.2D3 VH DNA sequence
  source 1..360: mol_type = other DNA
caggtgcagctgaagcagtcaggacctggcctagtgcagccctcacagagcctgtccatcacctgcacagtctctggtttctcattaactagttatggtgtacactgggttcgccagcctccaggaaagggtctggagtggctgggagtgatatggagtggtggaagcacagactataatgctgctttcatatccagactgagcatcagtaaggacaactccaagagccaagttttctttaaaatgaacagtctgcaagctgatgacactgccatatactactgtgccaaagggccttatgattacgacttaggctggtttgcttactggggccaagggactctggtcactgtctctgca

SEQ ID NO: 558 - DNA, 348 bp, synthetic construct
  misc_feature 1..348: note = 6H6.2D6 VH DNA sequence
  source 1..348: mol_type = other DNA
cagatccagctggtgcagtccggccccgagctgaagaagcccggcgagactgtgaagatctcctgcaaggcctccggctacaccttcaccacctacggcatgtcctgggtgaagcaggcccccggcaagggcctgaagtggatggcctggatcaacacctactccggcgtgcccacctacgccgacgacttcaagggcaggttcgccttctccctggagacttccgcctccaccgcctacctgcagatcaacaacctgaccaacgaggacaccgccacctacttctgcgccaggggcccctacgccatggactactggggccagggcacctccgtgaccgtgtcctcc

SEQ ID NO: 559 - DNA, 345 bp, synthetic construct
  misc_feature 1..345: note = 9H2.2H10 VH DNA sequence
  source 1..345: mol_type = other DNA
caggtccagctgcagcagcctggggctgaactggtggggcctgggtcttcagtgaagctgtcctgcaaggcttctggctacaccttcaccaactactggatacattgggtgaagcagaggcctctacaaggccttgaatggattggtaacattgacccttctgatagtgaaactcactacaatcaaaagttcaaggacaaggccacattgactgtagacaaatcctccagcacagcctacatgcaactcagcagcctgacatctgaggactctgcggtctattactgtgcaagacatggttactacgactactggggccaaggcaccactctcacagtctcctca

SEQ ID NO: 560 - DNA, 357 bp, synthetic construct
  misc_feature 1..357: note = 13G4.2F8 VH DNA sequence
  source 1..357: mol_type = other DNA
caggtccagctgcagcagcctggggctgagctggtaaagcctggggcttcagtgaagttgtcctgcaaggcttctggctacactttcaccagctactggatgcactgggtgaagcagaggcctggacaaggccttgagtggattggaatgattcatcctaacagtggtagtactgactacaatgagaagttcaagaacaaggccacactgaatgtagacaaatcctccagtacagcctacatacaactcagcagcctgacatctgaggactctgcggtctattactgtacaagatgggggatttattactacgcgagggactactggggccaaggcaccactctcacagtctcctca

SEQ ID NO: 561 - DNA, 351 bp, synthetic construct
  misc_feature 1..351: note = 13H12.2F8 VH DNA sequence
  source 1..351: mol_type = other DNA
cagatccagctggtccaatcaggacccgaactgaaaaaaccaggcgagacagtcaaaatcagctgtaaggcctcaggctacactttcacaacctacgggatgtcatgggtaaagcaagctcctggcaaggggctgaaatggatgggttggatcaacacatactctggagtgcccacctacgctgacgactttaagggtagattcgcatttagcctggaaacaagtgccagtacagcctacctccagataaacaacttgaaaaacgaggataccgcaacctatttttgcgccgtcccctacgagtacgacggtgcctattggggtcagggtacactcgtaacagtttccgcc

SEQ ID NO: 562 - DNA, 345 bp, synthetic construct
  misc_feature 1..345: note = 15G7.2A7 VH DNA sequence
  source 1..345: mol_type = other DNA
gaggtccagctgcaacaatctggacctgagctggtgaagcctggggcttcagtgaagatatcctgtaaggcttctggatacacgttcactgactactacatgaactgggtgaagcagagccatggaaagagccttgagtggattggagatattaatcctaacaatggtggtactaactacaaccagaagttcaagggcaaggccacattgactgtagacaagtcctccagcacagcctacatggagctccgcagcctgacatctgaggactctgcagtctattactgcacctcaggctacgggtttccttactggggccaggggactctggtcactgtctctgca

SEQ ID NO: 563 - DNA, 351 bp, synthetic construct
  misc_feature 1..351: note = 19D9.2E5 VH DNA sequence
  source 1..351: mol_type = other DNA
cagatccagttggtacagtctggacctgagctgaagaagcctggagagacagtcaagatctcctgcaaggcttctggatataccttcacaacctatggaatgggctgggtgaaacaggctccaggaaagggtttgaagtggatgggctggataaacacctactctggcgtgccaacatatgctgatgacttcaagggacggtttgccttctctttggaaacctctaccagcactgcctatttgcagatcaacaacctcaaaaatgaggacatggctacatatttctgtgcaaccccttatgaatacgacggggcttactggggccaagggactctggtcactgtctctgca

SEQ ID NO: 564 - DNA, 336 bp, synthetic construct
  misc_feature 1..336: note = 23B10.2B12 VH DNA sequence
  source 1..336: mol_type = other DNA
caggtccagctgcagcagtctggacctgaactggtgaagcctggggattctgtgaagatatcctgcaaggctgctggctacaccttcagtgactattatataaactgggtgaagcagaggcctggacagggacttgagtggattggatggatttatcctgtaagcgttaatactaagtacaatgagaagttcaagggcaaggccacattgactgtagacacatcctccagcacagcctacatgcagctcagcagcctgacctctgaggactctggggtctatttctgtgcctaccttgattattggggccaagggactctggtcactgtctctgca

SEQ ID NO: 565 - DNA, 360 bp, synthetic construct
  misc_feature 1..360: note = 24D12.2H9 VH DNA sequence
  source 1..360: mol_type = other DNA
caggtgcagctgaagcagtcaggacctggcctagtgcagccctcacagagcctgtccatcacctgcacagtctctggtttctcattaactagctatggtgtacactgggttcgccaggctccaggaaagggtctggaatggctgggagtgatatggagtggtggaagcacagactataatgctgctttcatgtccagactgagcatcagcaaggacaactccaagagccaagttttctttaaaatgaacagtctgcaagctgatgacactgccatatactactgtgccaaaagccctgatggttacgacgtcgcctggtttggttactggggccaagggactctggtcactgtctctgca

SEQ ID NO: 566 - DNA, 366 bp, synthetic construct
  misc_feature 1..366: note = F846C.1B2 VH DNA sequence
  source 1..366: mol_type = other DNA
cagatccagttggtgcagtctggacctgagctgaagaagcctggagagacagtcaagatctcctgcaaggcttctgggtataccttcacaaactatggaatgaattgggtgaagcaggctccaggaaagggtttaaagtggatgggctggataaacacctacactggagagccatcatatgctgatgacttcaagggacggtttgccttctctttggaaacctctgccagcactgcctatttgcagatcaacaacctcaaaaatgaggacatggctacatatttctgtgcaagatgggggggttacgctggggattactatgctatggacttctggggtcaaggaacctcagtcaccgtctcctca

SEQ ID NO: 567 - DNA, 366 bp, synthetic construct
  misc_feature 1..366: note = F846C.1F5 VH DNA sequence
  source 1..366: mol_type = other DNA
cagatccagttggtgcagtctggacctgagctgaagaagcctggagagacagtcaagatctcctgcaaggcttctgggtataccttcacaaactatggaatgaactgggtgaagcaggctccaggaaagggtttaaagtggatgggctggataaacacctacactggagagccatcatatgctgatgacttcaagggacggtttgccttctctttggaaacctctgccagcactgcctatttgcagatcaacaacctcaaaaatgaggacatggctacatatttctgtgcaagatgggggggttacgatggggattactatgctatggactactggggtcaaggaacctcagtcaccgtctcctca

SEQ ID NO: 568 - DNA, 366 bp, synthetic construct
  misc_feature 1..366: note = F846C.1H12 VH DNA sequence
  source 1..366: mol_type = other DNA
cagatccagttggtgcagtctggacctgagctgaagaagcctggagagacagtcaagatctcctgcaaggcttctgggtataccttcacaaactttggaatgaactgggtgaagcaggctccaggaaagggtttaaagtggatgggctggataaacacctacactggagagccatcatatgctgatgacttcaagggacggtttgccttctctttggaaacctctgccagcactgcctatttgcagatcaacaacctcaaaaatgaggacattgctacatatttctgtgcaagatgggggggttacgctggggattactatgctatggactactggggtcaaggaacctcagtcaccgtctcctca

SEQ ID NO: 569 - DNA, 348 bp, synthetic construct
  misc_feature 1..348: note = F846C.1H5 VH DNA sequence
  source 1..348: mol_type = other DNA
gaggtccagctgttggagtctgggggaggcttagtgaagcctggagggtccctgaaactctcctgtgcagcctctggattcactttcagcagctatgccatgtcttgggttcgccagactccagagaagaggctggagtgggtcgcatccattagtagtggtggtgacacctactatccagacagtgtgaagggccgattcaccatctctagagataatgccaggaacatcctgtacctgcaaatgagcagtctgaggtctgaggacacggccatgtattactgtgcaagttatggtaactccctctttgactactggggccaaggcaccactctcacagtctcctca

SEQ ID NO: 570 - DNA, 366 bp, synthetic construct; identical to SEQ ID NO: 567
  misc_feature 1..366: note = F846C.2H3 VH DNA sequence
  source 1..366: mol_type = other DNA

SEQ ID NO: 571 - DNA, 342 bp, synthetic construct
  misc_feature 1..342: note = F846TC.14A2 VH DNA sequence
  source 1..342: mol_type = other DNA
cagatccagttggtgcagtctggacctgagctgaagaagcctggagagacagtcaagatctcctgcaaggcttctgggtataccttcacaaactatggaatgaactgggtgaagcaggctccaggaaagggtttaaagtggatgggctggataaacacctacactggagagccaacatatgctggtgacctcaagggacggtttgccttctctttggaaacctctgccagcactgcctatttgcagatcaacaacctcaaaaatgaggacacggctacatatttctgtgtaagatatactatggactactggggtcaaggaacctcagtcaccgtctcctca

SEQ ID NO: 572 - DNA, 372 bp, synthetic construct
  misc_feature 1..372: note = F846TC.14E4 VH DNA sequence
  source 1..372: mol_type = other DNA
caggttactctgaaagagtctggccctgggatattgcagccctcccagaccctcagtctgacttgttctttctctgggttttcactgagcacttctggtatgggtgtaggctggattcgtcagccttcagggaagggtctggagtggctggcacacatttggtgggatgatgataagtactataacacagccctgaagagcgggctcacaatctccaaggatgcctccaaaaaccaggtcttcctcaagatcgccagtatggacactgcagatactgccacatactactgtgctcgaaacctctatgatggttcctacgggtactatgctatggactactggggtcaaggaacctcagtcaccgtctcctca

SEQ ID NO: 573 - DNA, 366 bp, synthetic construct
  misc_feature 1..366: note = F846TC.16B5 VH DNA sequence
  source 1..366: mol_type = other DNA
cagatccagttggtgcagtctggacctgagctgaagaagcctggagagacagtcaagatctcctgcaaggcttctgggtataccttcacaaactatggaatgaactgggtgaagcaggctccaggaaagggtttaaagtggatgggctggataaacacctacactggagagccagcatatgctgatgacttcaagggacggtttgccttctctttggaaacctctgccagcactgcctatttgcagatcaacaacctcaaaaatgaggacatggctacatatttctgtgcaagatgggggggttacgatggggattactatgctatggactactggggtcaaggaacctcagtcaccgtctcctca

SEQ ID NO: 574 - DNA, 369 bp, synthetic construct
  misc_feature 1..369: note = F846TC.7F10 VH DNA sequence
  source 1..369: mol_type = other DNA
gaagtgcagctggtggagtctgggggagacttagtgaagcctggagggtccctgaaactctcctgtgcagcctctggattcactttcagtaactatggcttgtcttggattcgccagactccagacaagaggctggagtgggtcgcaaccattagtagtggtggtagttacacctactatcctgacagtgtgaaggggcgattcaccatctccagagacagtgccaagaacaccctgtacctgcaaatgagcagtctgaagtctgaggacacagccatgtattactgtgcaagacatgcgcattactacggtgttagcccgtactactttgactactggggccaaggcacctgtctcacagtctcctca

SEQ ID NO: 575 - DNA, 357 bp, synthetic construct
  misc_feature 1..357: note = F847C.10B9 VH DNA sequence
  source 1..357: mol_type = other DNA
cagatccagttggtgcagtctggacctgaggtgaagaagcctggagagacagtcaagatctcctgcaaggcttctgggtatatcttcacaaactatggaatgaactgggtgaagcaggctccaggaaagggtttaaagtggatgggctggataaacacctacactggagagccaacatatactgatgacttcaagggacggtttgccttctctttggaaacctctgccagcactgcctatttgcagatcaacaacctcaaaaatgaggacacggctacatatttctgtgcaaagtttggtaactacgtgggagctatggactactggggtcaaggaacctcagtcaccgtctcctca

SEQ ID NO: 576 - DNA, 360 bp, synthetic construct
  misc_feature 1..360: note = F847C.11B1 VH DNA sequence
  source 1..360: mol_type = other DNA
gaggtccagcttcagcagtctggacctgagctggtgaaacctggggcctcagtgaagatatcctgcaaggcttctggaaacacattcactgaccacaacatgcactgggtgaagcagagccatggaaagagccttgagtggattggatatatttatccttacaatggtggtactggctacaaccagaagttcaagagcaaggccacattgactgtagacaattcctccagcacagtctacatggagctccgcagcctgacatctgaggactctgcagtctattactgtgcaagaggggagtatgattacctggcctggtttgcttactggggccaagggactctggtcactgtctctgca

SEQ ID NO: 577 - DNA, 357 bp, synthetic construct
  misc_feature 1..357: note = F847C.12F12 VH DNA sequence
  source 1..357: mol_type = other DNA
cagatccagttggtgcagtctggacctgagctgaagaagcctggagagacagtcaagatctcctgcaaggcttctgggtataccttcacaaactatggaatgaactgggtgaagcaggctccaggaaagggtttaaagtggatgggctggataaacacctacactggagagccaacatatgttgatgacttcaagggacggtttgccttctctttggaaacctctgccagcactgcctatttgcggatcaacaacctcaaaaatgaggacacggctacatatttctgtgcaaagtttggtaactacgtgggagctatggactactggggtcaaggaacctcagtcaccgtctcctca

SEQ ID NO: 578 - DNA, 357 bp, synthetic construct; identical to SEQ ID NO: 575
  misc_feature 1..357: note = F847C.26F5 VH DNA sequence
  source 1..357: mol_type = other DNA

SEQ ID NO: 579 - DNA, 351 bp, synthetic construct
  misc_feature 1..351: note = F847C.4B10 VH DNA sequence
  source 1..351: mol_type = other DNA
gaggtgcagcttgttgagactgggggaggcttagtgaagcctggagggtccctgaaactctcctgtgcagcctctggattcactttcagtagctatgccatgtcttgggttcgccagactccagagaagaggctggagtgggtcgcatccattagtagtggtggtagcacctactatccagacagtgtgaagggccgattcaccatctccagagataatgccaggaacatcctgtacctgcaaatgagcagtctgaggtctgaggacacggccatgtattactgtacaaggtttactacggtagtagagatggactactggggtcaaggaacctcagtcaccgtctcctca

SEQ ID NO: 580 - DNA, 336 bp, synthetic construct
  misc_feature 1..336: note = F849C.8D10 VH DNA sequence
  source 1..336: mol_type = other DNA
caggtccaactgcagcagactggtgctgagcttgtgaagcctggggcctcagtgaagctgtcctgcaaggcttctggctatactttcaccagctactggataaactgggtgaagcagaggcctggacaaggccttgagtggattggaaacatttatcctggtagtagtagtatttactacagtgagaagttcaagagtaaggccacactgactgtagacacatcctccagcacagcctacatgcagctcagcagcctgacatctgacgactctgcggtctattattgtgcaagatggggctactggggccaaggcaccactctcacagtctcctca

SEQ ID NO: 581 - DNA, 363 bp, synthetic construct
  misc_feature 1..363: note = F849C.8H3 VH DNA sequence
  source 1..363: mol_type = other DNA
caggttactctgaaagagtctggccctgggatattgcagccctcccagaccctcagtctgacttgttctttctctgggttttcactgagcacttttggtatgggtgtaggctggattcgtcagccttcagggaagggtctggagtggctggcacacatttggtgggatgatgataaacactataacccagccctgaagagccggctcacaatctccaaggatacctccaaaaaccaggtcttcctcaggatcgccaatgtggacactgcagataatgccacatattactgtgctcgaatcgactatggtgactacgtcgggtttgcttattggggccaagggactctggtcactgtctctgca

SEQ ID NO: 582 - DNA, 354 bp, synthetic construct
  misc_feature 1..354: note = 846.2B11 VH DNA sequence
  source 1..354: mol_type = other DNA
caggtccagctacagcagtctggacctgagctggtgaggcctggggctttagtgaagatttcctgcaaggcttctggttacaccttcacaagctacgatataaactgggtgaagcagaggcctggacagggacttgagtggattggatggatttatcctggagatggtagtactaaatataatgagaaattcaagggcaaggccacactgactgcagacaaatcctccagcacagcctacatgcagctcagcagcctgacttctgagaactctgcagtctatttctgtgcaagagaggcggcttctaatgctatggactactggggtcaaggaacctcagtcaccgtctcctca

SEQ ID NO: 583 - DNA, 366 bp, synthetic construct
  misc_feature 1..366: note = 846.4D5 VH DNA sequence
  source 1..366: mol_type = other DNA
gaagtgaagcttgaggagtctggaggaggcttggtgcaacctggaggatccatgaaactctcctgtgttgcctctggattcactttcagtaactactggatgaactgggtccgccagtctccagagaaggggcttgagtgggttgctgaaattagattgaaatctaataattatgcaacacattatgcggagtctgtgaaagggaggttcaccatctcaagagatgattccaaaagtagtgtctacctgcaaatgaacaacttaagagctgaagacactggcatttattactgtaccaggcactacggctttccctactggtacttcgatgtctggggcgcagggaccacggtcaccgtctcctca

SEQ ID NO: 584 - DNA, 354 bp, synthetic construct
  misc_feature 1..354: note = 846T.1H2 VH DNA sequence
  source 1..354: mol_type = other DNA
cagatccagttggtgcagtctggacctgagctgaagaagcctggagagacagtcaagatctcctgcaaggcttctgggtataccttcacaaactatggaatgaactgggtgaagcaggctccaggaaagggtttaaagtggatgggctggataaacaccaacactggagagccaacatatgctgaagagttcaagggacggtttgccttctctttggaaacctctgccagcactgcctatttgcagatcaacaacctcaaaaatgaggacacggctacatatttctgtgcaaccggggggggtaactgggactttgactactggggccaaggcaccactctcacagtctcctca

SEQ ID NO: 585 - DNA, 342 bp, synthetic construct
  misc_feature 1..342: note = 847.14H4 VH DNA sequence
  source 1..342: mol_type = other DNA
cagatccagttggtgcagtctggacctgaactgacgaagcctggagagacagtcaagatctcctgtaaggcttctggctataccttcacagactatggaatgaactgggtgaggcaggctccaggagagactttaaagtggatgggctggataaacacctacactggagagccaacatatgctgatgacttcaaggggcggtttgccttctctttggaatcctctgccagcactgcctatttgcagatcaacaacctcaaaaatgaggacgtggctacatatttctgtgcaagataccctatggactactggggtcaaggaacctcagtcaccgtctcctca

SEQ ID NO: 586 - DNA, 366 bp, synthetic construct
  misc_feature 1..366: note = 846.2D4 VH DNA sequence
  source 1..366: mol_type = other DNA
gaagtgaagcttgaggagtctggaggaggcttggtgcaacctggaggatccatgaaactctcctgtgttgcctctggattcactttcagtaactactggatgaactgggtccgccagtctccagagaaggggcttgagtgggttgctgaacttagattgaaatctaataattatgcaacacattatgcggagtctgtgaaagggaggttcaccatctcaagagatgattccaaaagtagtgtctacctgcaaatgaacaacttaagagctgaagacactggcatttattactgtaccaggcactacggctttccctactggtacttcgatgtctggggcgcagggaccacggtcaccgtctcctca

SEQ ID NO: 587 - DNA, 354 bp, synthetic construct
  misc_feature 1..354: note = 846.2F11 VH DNA sequence
  source 1..354: mol_type = other DNA
gaggtccagctgcagcagtctggacctgagctggtgaagcctggggcttcagtgaagatgtcctgcaaggcttctggatacacattcactagctatgttatgcactgggtgaagcagaagcctgggcagggccttgagtggattggatatattaatccttacaatgatggtactaagtacaatgagaagttcaaaggcaaggccacactgacttcagacaaatcctccagcacagcctacatggagctcagcagcctgacctctgaggactctgcggtctattactgtgcaagattacttttttactatgctatggactactggggtcaaggaacctcagtcaccgtctcctca

SEQ ID NO: 588 - DNA, 354 bp, synthetic construct
  misc_feature 1..354: note = 846T.10B1 VH DNA sequence
  source 1..354: mol_type = other DNA
caggttcagctgcagcagtctggacctgagctggtgaggcctggggctttagtgaagatttcctgcaaggcttctggttacaccttcacaagctacgatataaactgggtgaagcagaggcctggacagggacttgagtggattggatggatttatcctggagatggtagtactaaatacaatgagaaattcaagggcaaggccacactgactgcagacaaatcctccagcacagtttacatgcagctcagcagcctgacttctgagaactctgcagtctatttctgtgctagagaggcggcttctaatgccatggactactggggtcaaggaacctcagtcaccgtctcctca

SEQ ID NO: 589 - DNA, 354 bp, synthetic construct
  misc_feature 1..354: note = 846T.2E3 VH DNA sequence
  source 1..354: mol_type = other DNA
caggtccagctgcagcagtctggacctgagctggtgaagcctggggctttagtgaagatatcctgcaaggcttctggttacaccttcacaagctacgatataaactgggtgaagcagaggcctggacagggacttgagtggattggatggatttatcctggagatggtagtactaagtacaatgagaaattcaagggcaaggccgcactgactgcagacaagtcctccagcacagcctacatgcagctcagcagcctgacttctgagaactctgcagtctatttctgtgcaagagaggcggcttctaatgctatggactactggggtcaaggaacctcagtcaccgtctcctca

SEQ ID NO: 590 - DNA, 354 bp, synthetic construct
  misc_feature 1..354: note = 846T.4C9 VH DNA sequence
  source 1..354: mol_type = other DNA
gaggtccagctgcagcagtctggacctgagctggtaaagcctggggcttcagtgaagatgtcctgcaaggcttctggatactcattcactaactatattatgcactgggtgaagcagaagcctgggcagggccttgagtggattggatatattaatccttacaatgatggtactaagtacaatgagaagttcaaaggcaaggccacactgacttcagacaaatcctccagcacagcctacatggagctcagcagcctgacctctgaggactctgcggtctattactgtgcaagattacttttttactatgctatggactactggggtcaaggaacctcagtcaccgtctcctca

SEQ ID NO: 591 - DNA, 354 bp, synthetic construct
  misc_feature 1..354: note = 846T.4E11 VH DNA sequence
  source 1..354: mol_type = other DNA
caggttcagctgcagcagtctggagctgaactggtaaagcctggggcttcagtgaagttgtcctgcaaggcttctggctacaccttcagaagctatgatataaactgggtgaggcagaggcctgaacagggacttgagtggattggatggatttttcctggagaaggtatttctaagtacaatgagaagttcaagggcaaggccacactgactacagacaaattgtccagcacagcctacatgcagctcagcagcctgacatctgaggactctgctgtctatttctgtgcaagagaggctacggctggggctatggactactggggtcaaggaacctcagtcaccgtctcctca

SEQ ID NO: 592 - DNA, 366 bp, synthetic construct
  misc_feature 1..366: note = 846T.4F5 VH DNA sequence
  source 1..366: mol_type = other DNA
gaggtgaagcttctcgagtctggaggaggcttggtgcaacctggaggatccatgaaactctcctgtgttgcctctggattcactttcagtaacttctggatgaactgggtccgccagtctccagagaaggggcttgagtgggttgctgaaattagattgaaatctaataattatgcaacacattatgcggagtctgtgaaagggaggttcaccatctcaagagatgattccaaaagtagtgtctacctgcaaatgaacaacttaagagctgaagacactggcatttattactgtaccaggcactacggctttccctactggtacttcgatgtctggggcgcagggaccacggtcaccgtctcctca

SEQ ID NO: 593 - DNA, 354 bp, synthetic construct
  misc_feature 1..354: note = 846T.8D1 VH DNA sequence
  source 1..354: mol_type = other DNA
cagattcagttgcagcagtctggagctgaactggtaaagcctggggcttcagtgaagttgtcctgcaaggcttctggctacaccttcacaagctatgatatatgctgggtgaggcagaggcctgagcagggacttgagtggattggatggatttttcctggagatggtactactaagtacactgagaacttcaagggcaaggccacactgactacagacaaatcctccagcacagcctacatgcacctcagcaggctgacatctgaggactctgctgtctatttctgtgcaagggagggggcgggctcctggtttgcttactggggccaagggactctggtcactgtctctgca

SEQ ID NO: 594 - DNA, 342 bp, synthetic construct
  misc_feature 1..342: note = 847.10C9 VH DNA sequence
  source 1..342: mol_type = other DNA
gaggttcagctgcagcagtctggagctgagctggtgcggcctgggacttcagtgaaggtgtcctgcaaggcttcggaatacgccttcaataattacatgatggaatgggtaaaacagaggcctggacagggccttgagtggattggagtgattaatcccggaagtggtgctactaattacaatgagaatttcaaggacaaggcaacactgactgcagacaaatcctccaccactgcctacatgcagctcagcagcctgacatctgatgactctgcggtctatttctgtacctacaatgatcttggttactggggccaagggactctggtcactgtctctgca

SEQ ID NO: 595 - DNA, 369 bp, synthetic construct
  misc_feature 1..369: note = 847.11D6 VH DNA sequence
  source 1..369: mol_type = other DNA
gaggtcaagctgcagcagtctggacctgagctgatgaagcctggaacttcaatgaagatatcctgtaaggcttctggttactcattcaccggctacaccatgaactgggtgaagcagagccatggaaagaaccttgagtggattggacttattaatccttacaatggtggtactaactacaaccagaagttcaggggcaaggccacattaagtgtagacaagtcatccaacacagcctacatggagctcctcagtctgacatctgaagactctgcagtctattactgtgcaagaaaggacgattattacggaagtagtccctatgctctggactactggggtcaaggaacctcagtcaccgtctcctca

SEQ ID NO: 596 - DNA, 348 bp, synthetic construct
  misc_feature 1..348: note = 847.15D12 VH DNA sequence
  source 1..348: mol_type = other DNA
caggtccagctgcagcagtctggagctgagctgatgaagcctggggcctcagtgaagatatcctgcaaggctactggctacacattcactaactactggatagagtgggtaaagcagaggcctggacatggccttgaatggattggagaatttttacctggagatggcagtagtcactacaatgagaagttcaagggcaaggccacattcacttcagatacatcctccaacacagcctacatacacctcaccagcctgacatctgaggactctgccgtctattactgtgtaagagatgactacgacagtgactactgggcccaaggcaccactctcacagtctcctca

SEQ ID NO: 597 - DNA, 360 bp, synthetic construct
  misc_feature 1..360: note = 847.15F9 VH DNA sequence
  source 1..360: mol_type = other DNA
caggtgcagatgaagcagtcaggacctggcctagtgcagccctcacagagcctgtccatcacctgcacagtctctggtttctcattaatcaactatggtgtacactgggttcgccaatctccaggaaagggtctggagtggctgggagtgatatggagtggtggaagcacagactataatgcagctttcatatccagactgagcatcagcaaggacaattccaagagccaagttttctttaaaatgaacagtctgcaagctgatgacacagccatatattactgtgccagaatttattactacggtaggggctatgctatggactactggggtcaaggaacctcagtcaccgtctcctca

SEQ ID NO: 598 - DNA, 366 bp, synthetic construct
  misc_feature 1..366: note = 847.15H11 VH DNA sequence
  source 1..366: mol_type = other DNA
gaggtccagcttcagcagtctggggctgaagttgtgaagcctggggctccagtgaagctgtcctgcaaggcttctggctacaccttcaacaactactggctgaactgggtgaaacagcggcctggacgaggcctcgagtggattggaaggattgatccttccgatagtgaaactcactacaatcaaaagttcaaggacaaggccacactgactgtagacatgtcctccagcacagcctacatccaactcagcagcctgacatctgaggactctgcggtctattactgtgcaagaggggattattattacggtactaggggtcctatggactactggggtcaaggcacctcagtcaccgtctcctca

SEQ ID NO: 599 - DNA, 345 bp, synthetic construct
  misc_feature 1..345: note = 847.20H7 VH DNA sequence
  source 1..345: mol_type = other DNA
caggtccagctgcagcagtctggggctgagctggtgaggcctggggcttcagtgaacctgtcctgcaaggcttctggctacaccttcaccaactactggatgaactgggtgaagcagaggcctggacaaggccttgaatgggttggtatgattgatccttcagacagtgaaactcactacaatcaaatgttcaaggacaaggccacattgactatagacaaatcttccagcatagcctacatgcagctcagcagcctgacatctgaggactctgcggtctattactgtgcaagatggggtgctatggactactggggtcaaggaacctcagtcaccgtctcctca

SEQ ID NO: 600 - DNA, 363 bp, synthetic construct
  misc_feature 1..363: note = 847.21B11 VH DNA sequence
  source 1..363: mol_type = other DNA
caggtgcaactgaagcagtcaggacctggcctggtggcgccctcacagagcctgtccatcacttgcactgtctctggattttcattaaccagctatggtgtacactgggttcgccagcctccaggaaagggtctggagtggctgggaataatatgggctggtggaagcacaaattataatccggctctcatgtccagactgagcatcagcaaagacaaatccaagagccaagttttcttaaaaatgaacagtctgaaaactgatgacacagccatgtactactgtgccagagatcgggcttcattactacggccgggggctatggactactggggtcaaggaacctcagtcaccgtctcctca

SEQ ID NO: 601 - DNA, 354 bp, synthetic construct
  misc_feature 1..354: note = 847.27B9 VH DNA sequence
  source 1..354: mol_type = other DNA
cagatccagttggtgcagtctggacctgagctgaagaagcctggagagacagtcaagatctcctgcaaggcttctgggtataccttcacaaactatggaatgaactgggtgaagcaggctccaggaaagggtttaaagtggatgggctggataaacaccaacactggagagccaacatatgctgaagagttcaagggacggtttgccttctctttggagacctctgccagcactgcctatttgcagatcaactacctcaaaaatgaggacacggctacatttttctgtgcaagattggactatgattacgacgaggactactggggccaaggcaccactctcacagtctcctca

SEQ ID NO: 602 - DNA, 360 bp, synthetic construct
  misc_feature 1..360: note = 847.28D1 VH DNA sequence
  source 1..360: mol_type = other DNA
caggtgcagcttgtagagaccggacctggcctggtggcgccctcacagagcctgtccatcacttgcactgtctctgggttttcattaaccagctatggtgtacactggattcgtcagtctccaggaaagggtctggagtggctgggaactatatgggctggtggaagcacagattataattcgccactcatgtccagactgagcatcagcaaagacaactccaagaaccaagtttttttaaaaatgaatagtctgcagattgatgacacagccatatattattgtgccagtcctccttctgggtatgattacgacgtgtttgcttcctggggccaagggactctggtcactgtctctgca

SEQ ID NO: 603 - DNA, 360 bp, synthetic construct
  misc_feature 1..360: note = 847.2B8 VH DNA sequence
  source 1..360: mol_type = other DNA
caggtacaactgaagcagtcaggacctggcctagtgcagccctcacagagcctgtccatcacctgcacagtctctggtttctcattaatcaactatggtgtacactgggttcgccaatctccaggaaagggtctggagtggctgggagtgatatggagtggtggaagcacagactataatgcagctttcatatccagactgagcatcagcaaggacaattccaagagccaagttttctttaaaatgaacagtctgcaagctgatgacacagccatatattactgtgccagaatttattactacggtaggggctatgctatggactactggggtcaaggaacctcagtcaccgtctcctca

SEQ ID NO: 604 - DNA, 360 bp, synthetic construct
  misc_feature 1..360: note = 847.3B3 VH DNA sequence
  source 1..360: mol_type = other DNA
caggtgcagctgaaggagtcaggacctggcctggtggcgccctcacagagcctgtccatcacttgcactgtctctgggttttcattaaccagctatggtgtacactggattcgccagcctccaggaaagggtctggagtggctgggaggaatatgggctggtggaagtacagattacaattcgcctctcatgtcccgactgagtatcactaaagacaactccaagagccaagttttcttaaaaatgaacagtctgcaaagtgatgacacagccatgtactactgtgccagtcctccctctgggtatgattacgacgtgtttgcttactggggccaagggactctggtcactgtctctgca

SEQ ID NO: 605 - DNA, 360 bp, synthetic construct
  misc_feature 1..360: note = 849.1D2 VH DNA sequence
  source 1..360: mol_type = other DNA
caggtgcagctgaaggagtcaggacctgtcctggtggcgccctcacagagcctgtccatcacttgcactgtctctgggttttcattaagcagctatggtgtacactgggttcgccagcctccaggaaagggtctggagtggctgggagtaatatgggctggtggaagcacagattatgattcagctctcatgtccagactgagcatcagcaaagacaactccaagagccaagttttcttaaaaatggacagtctgcaaactgatgacacagccatgtactactgtgccaaacccccatatgattacgacggggcctggtttgcttactggggccaagggactctggtcactgtctctgca

SEQ ID NO: 606 - DNA, 342 bp, synthetic construct
  misc_feature 1..342: note = 849.2D7 VH DNA sequence
  source 1..342: mol_type = other DNA
caggtgcaactgcagcagtctgggcctcagctggttaggcctggggcttcagtgaagatatcctgcaaggcttctggttactcattcaccaactactggatgcactgggtgaagcagaggcctggacaaggtcttgagtggattggcatgattgatccttccgatagtgaaactaggttaaatcagaagttcaaggacaaggccacattgactgtagacaaatcctccagcacagcctacatgcaactcagcagcccgacatctgaggactctgcggtctattactgtgcaacggggagacccgactactggggccaaggcaccactctcacagtctcctca

SEQ ID NO: 607 - DNA, 342 bp, synthetic construct
  misc_feature 1..342: note = 849.2F12 VH DNA sequence
  source 1..342: mol_type = other DNA
caggtgcaactgcagcagtctgggcctcagctggttaggcctggggcttcagtgaagatatcctgcaaggcttctggttactcattcaccagctactggatgcactgggtgaagcagaggcctggacaaggtcttgagtggattggcatgattgatccttccgatagtgaaactaggttaaatcagaagttcaaggacaaggccacattgactgtagacaaatcctccagcacagcctacatgcaactcagcagcccgacatctgaggactctatagtctattactgtgcaaaggggagacccgactactggggccaaggcaccactctcacagtctcctca

SEQ ID NO: 608 - DNA, 354 bp, synthetic construct
  misc_feature 1..354: note = 849.4B2 VH DNA sequence
  source 1..354: mol_type = other DNA
gatggaaaacttcaggagtcaggacctggcctcgtgaaaccttctcagtctctgtctctcacctgctctgtcactggctactccatcaccagtggttattactggaactggatccggcagtttccaggaaacaaactggaatggatgggccacataagctacgatggtagaaataactacaacccatctctcaaaaatcgaatctccatcactcgtgacacatctaagaaccagtttttcctgaagttgaattctgtgactactgaggacacagccacatattactgtgcaggctatgatttcctctggtacttcgatgtctggggcacagggaccacggtcaccgtctcctca

SEQ ID NO: 609 - DNA, 363 bp, synthetic construct
  misc_feature 1..363: note = 849.4F12 VH DNA sequence
  source 1..363: mol_type = other DNA
caggtgcagctgaaggagtctggccctgggatattgcagccctcccagaccctcagtctgacttgttctttctctgggttttcactgagcacttttggtatgggtgtaggctggattcgtcagccttcagggaagggtctggagtggctggcacacatttggtgggatgatgataaacactataacccagccctgaagagccggctcacaatctccaaggatacctccaaaaaccaggtcttcctcaggatcgccaatgtggacactgcagataatgccacatattactgtgctcgaatcgactatggtgactacgtcgggtttgcttattggggccaagggactctggtcactgtctctgca

SEQ ID NO: 610 - DNA, 354 bp, synthetic construct
  misc_feature 1..354: note = 849.4F2 VH DNA sequence
  source 1..354: mol_type = other DNA
gatggacagcttcaggagtcaggacctggcctcgtgaaaccttctcagtctctgtctctcacctgctctgtcactggctactccatcaccagtggttattactggaactggatccggcagtttccaggaaacaaactggaatggatgggccacataagctacgatggtagaaataactacaacccatctctcaaaaatcgaatctccatcactcgtgacacatctaagaaccagtttttcctgaagttgaattctgtgactactgaggacacagccacatattactgtgcaggctatgatttcctctggtacttcgatgtctggggcacagggaccacggtcaccgtctcctca

SEQ ID NO: 611 - DNA, 357 bp, synthetic construct
  misc_feature 1..357: note = 849.5C2 VH DNA sequence
  source 1..357: mol_type = other DNA
gaggttcagctgcagcagtctggggcagagcttgtgaagtcaggggcctcagtcaagttgtcctgcacagcttctggcttcaacattaaagactactatatgcactgggtgaagcagaggactgaacagggcctggagtggattggaaggatttatcctgaggatgatgaaactaaatatgccccgaaattccagggcaaggccactataacagcagacacatcctccaacacagcctacctgcagctcagcagcctgacatctgaggacactgccgtctattactgtgctagatcagggggttactacgtttggtttgcttactggggccaagggactctggtcactgtctctgca

SEQ ID NO: 612 - DNA, 363 bp, synthetic construct
  misc_feature 1..363: note = 849.8D12 VH DNA sequence
  source 1..363: mol_type = other DNA
gaggtccagctacaacagtctggacctgagctggtgaagcctgggtcttcagtgaagatatcctgcaaggcttctagatacacattcactgactacaacatggactgggtgaagcagagccatggaaagagacttgagtggattggatatatttatcctaacaatggtggtactggctacaaccagaagttcaagggcaaggccacattgactgtagacaagtcctccagcacagcctacatggagctccgcagcctgacatctgaggactctgcagtctattactgtgcaaggtcctactacgatggtagctacgatgctatggactactggggtcaaggaacctcagtcaccgtctcctca

SEQ ID NO: 613 - DNA, 342 bp, synthetic construct
  misc_feature 1..342: note = F847C.21H6 VH DNA sequence
  source 1..342: mol_type = other DNA
cagatccagttggtgcagtctggacctgagctgaagaagcctggagagacagtcaagatctcctgcaaggcttctgggtataccttcacaatctttggaatgaactgggtgaagcaggctccaggaaagggtttaaagtggatgggctgggtaaacacctacactggagagccaacatatgctgatgacttcaagggacggtttgccttctctttggaaacctctgccagcactgcctatttgcagatcaacaacctcaaaaatgaggacacggctacatatttctgtgcaagaggctggtttgcttactggggccaagggactctggtcactgtctctgca

SEQ ID NO: 614 - DNA, 360 bp, synthetic construct
  misc_feature 1..360: note = 849.5H1 VH DNA sequence
  source 1..360: mol_type = other DNA
caggtgcagctgaaggagtcaggacctgtcctggtggcgccctcacagagcctgtccatcacttgcactgtctctgggttttcattaaccagttatggtatacactgggttcgccagcctccaggaaagggtctggagtggctgggagtaatatgggctggtggaagcacaaattataattcagctctcatgtccagactgagcatcagcaaagacaactccaagagccaagttttcttaaaaatgaacagtctgcaaattgatgacacagccatgtactattgtgccaaacccccccatgattacgaccaggcctggtttgcttactggggccaagggactctgatcactgtctctgca

SEQ ID NO: 615 - DNA, 348 bp, synthetic construct
  misc_feature 1..348: note = 847.23F11 VH DNA sequence
  source 1..348: mol_type = other DNA
caggtccagctgcagcagtctggggctgagctggtgaggcctggggcttcagtgaagctgtcctgcaaggcttctggctacaccttcaccagctcctggatgaactgggtgaaacagaggcctggacaaggccttgactggattggtatgattgatccttcagacagtgaaactcactacaatcaaatgttcaaggacaaggccacattgactgtagacaaatcctctaacacagcctacatgcagctcagcaggctgacatctgaggactcagcggtctattactgtgtaaatagtaactacgagagtggctattggggccaaggcaccactctcacagtctcctca

SEQ ID NO: 616 - DNA, 348 bp, synthetic construct
  misc_feature 1..348: note = 847.16D10 VH DNA sequence
  source 1..348: mol_type = other DNA
caggtccagctgcagcagtctggggctgagctggtgaggcctggggcttcagtgaagctgtcctgcaaggcttctggctacaccttcaccggctactggttgaactgggtgaagcagaggcctggacaaggcctggaatggattggtatgattgatccttcagacagtgaaactcactacaatcaagtgttcaaggacaaggccacaatgactgtagacaggtcctccagcacagcctacatgcagctcagcggactgacatctgaggactctgcggtctattactgtgcaaatagtaactacgcgagtggctcctggggccagggcaccactctcacagtctcctca

SEQ ID NO: 617 - DNA, 360 bp, synthetic construct
  misc_feature 1..360: note = 847.13E2-mH0mL1 VH DNA sequence
  source 1..360: mol_type = other DNA
gaggtccagcttcagcagtctggacctgagctggtgaagcctggggcttcagtgaaggtttcctgcaaggcttctggttactcattcactgactacaacatgtactgggtgatgcagagccatggaaagagccttgagtggattggatatattgatccttacaatgatgctactagctacagccagaagttcacgggcaaggccacattgactgttgacaagtcctccagcacagccttcatgcatctcaacagcctgacatctgaggactctgcagtctattactgtgcaagatgggggaggtacgaatactatgctatggactattggggtcaaggaacctcagtcaccgtctcctca

SEQ ID NO: 618 - DNA, 360 bp, synthetic construct; identical to SEQ ID NO: 617
  misc_feature 1..360: note = 847.13E2-mH0mL2 VH DNA sequence
  source 1..360: mol_type = other DNA

SEQ ID NO: 619 - DNA, 345 bp, synthetic construct
  misc_feature 1..345: note = 847.12C4 VH DNA sequence
  source 1..345: mol_type = other DNA
caggtacagctgaaggagtcaggacctgaccttgtgcagccctcacagaccctgtctctcacctgcactgtctctgggttctcattaaccatctatggtgttcactgggttcgccagcctccaggaaagggactggagtgggtgggaacagtggcctgggatgacaaaaaatattataattcacctctacaatctcgactgagcatcagcagggatacctccaagaaccaagttttcttaaaactgagcagtctgcaaactgaagacacagccatgtactactgtactatgactgggggccctataaactactggggtccaggaacctcagtcaccgtctcctca

SEQ ID NO: 620 - DNA, 351 bp, synthetic construct
  misc_feature 1..351: note = 847.4D3 VH DNA sequence
  source 1..351: mol_type = other DNA
gaggtgcagctggtggagtctgggggaggcttagtgaagcctggagggtccctgaaactctcctgtgcagcctctggattcactttcagtagctatgccatgtcttgggttcgccagactccagagaagaggctggagtgggtcgcatccattagtagtggtgatagcccctactatccagacagtgtgaagggccgcttcaccatctccagagataatgccaggaacatcctgtacctgcaaatgagcagtctgaggtctgaggacacggccatgtattactgtacaaggtttactacggtagtagagatggactactggggtcaaggaacctcagtcaccgtctcctca

SEQ ID NO: 621 - DNA, 336 bp, synthetic construct
  misc_feature 1..336: note = TB001 VL DNA sequence
  source 1..336: mol_type = other DNA
gacatcgtgctgacccagtctccactgagcctgcctgttacacctggcgagccagcctccatctcctgcagatcctctaagtccctgctgtacaaggacggcaagacctacctgaactggttcctgcagaagcccggccagtctcctcagctcctgatctacctgatgagcacccatgcctctggcgtgcccgatagattttccggctctggctctggcaccgacttcaccctgaagatctccagagtggaagccgaggacgtgggcgtgtactactgtcagcagctggtggactaccctctgacctttggcggcggaacaaagctggaaatcaag

SEQ ID NO: 622 - DNA, 336 bp, synthetic construct
  misc_feature 1..336: note = TB006 VL DNA sequence
  source 1..336: mol_type = other DNA
gatatagtgatgacccaaacacctttgtccctgtcagtcaccccaggccaacccgcatctatctcatgcaaatcctcaaaaagtcttttgcactctgacgggataacatatctctactggtatcttcaaaaacctggtcagtccccccagctcttgatctatagaatgagtaaccttgcctctggtgtccccgaccggtttagtggaagcgggtctgggaccgacttcaccctcaagattagtcgcgtcgaagccgaagatgtgggagtgtattactgtgcccagatgctcgaatttcccctgacatttggtcaaggaactaaattggagattaag

SEQ ID NO: 623 - DNA, 321 bp, synthetic construct
  misc_feature 1..321: note = 12G5.D7 VL DNA sequence
  source 1..321: mol_type = other DNA
gacatcctgatgacccaatctccatcctccatgtctgtatctctgggagacacagtcagcatcacttgccatgcaagtcagggcattaactctaatatggggtggttgcagcagaaaccagggaaatcatttaagggcctgatctatcatgcaaccaacttggaagatggagttccatcaaggttcagtggcagtggatctggagcagattattctctcaccatcagcagcctggaatctgaagattttgcagactattactgtgtacagtatgctcagtttcctcctacgttcggatcggggaccaagctggaaataaaa

SEQ ID NO: 624 - DNA, 336 bp, synthetic construct
  misc_feature 1..336: note = 13A12.2E5 VL DNA sequence
  source 1..336: mol_type = other DNA
gatgttgtgatgacccagactccactcactttgtcggttgccattggacaaccagcttccatctcttgcaagtcgagtcagagcctcttatatactaatggaaaaacctatttgaattggttattacagaggccaggccagtctccaaaacgcctaatctatctgctgtctaaattggactctggagtccctgacaggttcagtgccagtggatcagggacagatttcacactgaaaatcagcagagtggaggctgaggatttgggagtttattactgcttgcagagtacacattttccgctcacgttcggtgctgggaccaagctggagatgaaa

SEQ ID NO: 625 - DNA, 336 bp, synthetic construct
  misc_feature 1..336: note = 14H10.2C9 VL DNA sequence
  source 1..336: mol_type = other DNA
gatgttgtgatgacccagactccactcactttgtcggttaccattggacaaccagcctccatctcttgcaagtcaagtcagagcctcttcgatagtgatggaaagacatatttgaattggttgttacagaggccaggccagtctccaaagcgcctaatctatctggtgtctaaactggactctggagtccctgacaggttcactggcagtggatcagggacagatttcacactgaaaatcagcagagtggaggctgaggatttgggagtttattattgctggcaaggtacacattttcctctcacgttcggtgctgggaccaagctggaaatgaaa

SEQ ID NO: 626 - DNA, 336 bp, synthetic construct
  misc_feature 1..336: note = 15F10.2D6 VL DNA sequence
  source 1..336: mol_type = other DNA
gatgttttgatgacccaaactccactctccctgcctgtcagtcttggagatcaagcctccatctcttgcagatctagtcagagcattgtacataataatggaaacacctatttagaatggtacctgcagaaaccaggccagtctccaaaactcctgatctacaaagtttccaaccgattttctggggtcccagacaggttcagtggcagtggatcagggacagatttcacactcaagatcagcagagtggaggctgaggatctgggagtttattactgctttcaaggttcacatgttccgctcacgttcggtggtgggaccaagttggagctgaaa

SEQ ID NO: 627 - DNA, 321 bp, synthetic construct
  misc_feature 1..321: note = 19B5.2E6 VL DNA sequence
  source 1..321: mol_type = other DNA
gatatacaaatgactcaaactacctcttctctttccgcatctttgggtgatcgggtcactatatcctgctccgcctctcaaggcataaacaattacctgaattggtatcagcaaaaaccagacggaactgtaaaattgcttatctactacgcttcaagtctgcatagtggggttcccagcagattttccggttccgggtccggcactgattattctctcacaattagtaacctggaacctgaggacattgcaacttattactgtcaacaatacagtcaggtaccttacactttcggatcaggaacaaagttggaaatcaag

SEQ ID NO: 628 - DNA, 321 bp, synthetic construct
  misc_feature 1..321: note = 20D11.2C6 VL DNA sequence
  source 1..321: mol_type = other DNA
gacatccagatgaaccagtctccatccagtctgtctgcatccctcggagacacaattaccatcacttgccgtgccagtcagaacatttatatttggttaagttggtaccagcagaaaccaggaaatattcctaaactcttgatctataaggcttccaacttgcacacaggcgtcccatcaaggtttagtggcagtggatctggaacagatttcacattaaccatcagcactctgcagcctgaagacattgccacttacttctgtctccagggtcaaagttatcctctcacgttcggtgctgggaccaagctggagatgaaa

SEQ ID NO: 629 - DNA, 321 bp, synthetic construct
  misc_feature 1..321: note = 20H5.A3 VL DNA sequence
  source 1..321: mol_type = other DNA
gatatccagatgacacagactacatcctccctgtctgcctctctgggagacagagtcaccatcaattgcagtgcaagtcaggacattagcaattatttaaactggtatcagcagaaaccagatggaactgttaaactcctgatctattacacatcaagtttactctcaggagtcccatcaaggttcagtggcagtgggtctgggacagattattctctcaccatcagcaacctggaacctgaagatattgccacttacttttgtcagcaatatagtaagcttccctatacgttcggatcggggacccacctggaaataaaa

SEQ ID NO: 630 - DNA, 321 bp, synthetic construct
  misc_feature 1..321: note = 23H9.2E4 VL DNA sequence
  source 1..321: mol_type = other DNA
gatatccagatgacacagactacatcctccctgtctgcctctctgggagacagagtcaccatcagttgcagtgcaagtcagggcattaacaattatttaaactggtatcagcagaaaccagatggaactgttaaactcctgatctattacgcatcaagtttacactcaggagtcccatcaaggttcagtggcagtgggtctgggacagattattctctcaccatcagcaacctggaacctgaagatattgccacttactattgtcagcagtatagtcaggttccgtatacgttcggatcggggaccaagttggaaataaaa

SEQ ID NO: 631 - DNA, 336 bp, synthetic construct
  misc_feature 1..336: note = 2D10-VH0-VL0 VL DNA sequence
  source 1..336: mol_type = other DNA
gacatagtaatgacacaggccgcatttagcaatccagtaaccttgggcacatccgcctccatatcttgcaggtcatccaaaagcttgctgcactctgacggtattacttacctgtactggtatttgcagcgacctgggcaatcccctcaactcctgatttaccgcatgagcaacctggcctcaggggtgcctgaccgcttttcaggatcagggagcggcactgacttcaccttgcgaatcagcagagtagaagcagaggatgttggagtttactactgtgcccagatgatcgaatttccacttacttttggggccgggaccattctggagcttaaa

SEQ ID NO: 632 - DNA, 336 bp, synthetic construct
  misc_feature 1..336: note = 3B11.2G2 VL DNA sequence
  source 1..336: mol_type = other DNA
gatgttgtgatgacccagactccactcactttgtcggttgccattggacaaccagcttccatctcttgcaagtcgagtcagagcctcttatatactaatggaaaaacctatttgaattggttattacagaggccaggccagtctccaaaacgcctaatctatctggtgtctaaattggactctggagtccctgacaggttcagtggcagtggatcagggacagatttcacactgaaaatcagcagagtggaggctgaggatttgggagtttattactgcttgcagagtacacattttccgctcacgttcggtgctgggaccaagctggagctgaaa

SEQ ID NO: 633 - DNA, 336 bp, synthetic construct
  misc_feature 1..336: note = 7D8.2D8 VL DNA sequence
  source 1..336: mol_type = other DNA
gatgttttgatgacccaaactccactctccctgcctgtcagtcttggagatcaagcctccatctcttgcagatctagtcagagcattgtacatagtaatggaaacacctatttagaatggtacctgcagaaaccaggccagtctccaaagctcctgatctacaaagtttccaaccgattttctggggtcccagacaggttcagtggcagtggatcagggacagatttcacactcaagatcagcagagtggaggctgaggatctgggagtttattactgctttcaaggttcacatgttccgctcacgttcggtgctgggaccaagctggagctgaaa

SEQ ID NO: 634 - DNA, 336 bp, synthetic construct
  misc_feature 1..336: note = mIMT001 VL DNA sequence
  source 1..336: mol_type = other DNA
gatattgttattactcaggatgagcttagtaatcctgtcactagcggggaaagtgttagtatcagttgtcgttcatccaagtcactcctctacaaagacggcaagacttatctcaactggtttcttcaacgacccggtcaatctccacagctcctgatttacctgatgtcaactcacgcttctggtgttagcgaccgtttctccggaagtggctccgggacagacttcactcttgaaatctcacgtgtaaaagcagaggacgtaggtgtctattattgtcaacagcttgtggactaccccttgacctttggcgctggcacaaagctggaactgaag

SEQ ID NO: 635 - DNA, 336 bp, synthetic construct
  misc_feature 1..336: note = 4A11.2B5 VL DNA sequence
  source 1..336: mol_type = other DNA
gacattgtgatgactcaggcagccttttccaaccctgtaacacttggaactagtgcctccatctcatgccgttccagcaagagtcttttgcacagcgatgggataacctatctctattggtatctgcaacgacccggtcagtcaccccaacttcttatctatcgaatgtctaacttggcctccggcgtgcccgaccgcttttccgggagtgggagcggtacagatttcaccttgcgaatttcccgggttgaggcagaggacgtaggtgtctactattgtgctcagatgcttgagtttcctctcactttcggagccggcaccaaactggaactgaaa

SEQ ID NO: 636 - DNA, 336 bp, synthetic construct; identical to SEQ ID NO: 622
  misc_feature 1..336: note = 4A11.H1L1 VL DNA sequence
  source 1..336: mol_type = other DNA

SEQ ID NO: 637 - DNA, 336 bp, synthetic construct
  misc_feature 1..336: note = 4A11.H4L2 VL DNA sequence
  source 1..336: mol_type = other DNA
gatattgtaatgacccaaagccccctgtccttgcctgttaccccaggtgagcctgccagcatatcttgccgatccagtaaatctctgcttcatagcgatggcatcacctatttgtattggtatttgcagaagcccggccagagcccccagttgctgatctacagaatgtccaaccttgctagtggagtgcccgaccggtttagcggttcaggctcagggactgatttcactcttaaaatcagtagggtagaggccgaagacgttggtgtatattattgtgctcagatgttggagtttccactcacatttggacaaggtacaaagctggaaattaag

SEQ ID NO: 638 - DNA, 336 bp, synthetic construct
  misc_feature 1..336: note = 4G2.2G6 VL DNA sequence
  source 1..336: mol_type = other DNA
gatgtcgtaatgactcaaacccccctgacccttagtgttactataggccagcccgcaagcatctcctgcaaatcctcccagtctcttctttatactgatggcaaaacctacttgtcctggtttttgcagcgcccaggtcaaagtcctaaacgtcttatttacttggtctctaaactcgattccggcgtgcctgaccggttctccggtagcggtagcggtaccgatttcactttgaagattagccgagttgaggcagaagacctcggggtctactactgccttcagagtacacacttcccacttacatttggcgcaggaaccaagttggaggttaaa

SEQ ID NO: 639 - DNA, 321 bp, synthetic construct
  misc_feature 1..321: note = 6B3.2D3 VL DNA sequence
  source 1..321: mol_type = other DNA
agtattgtgatgacccagactcccaaattcctgcttgtatcagcaggagacagggttaccataacctgcaaggccagtcagagtgtgagtaatgatgtagcttggtaccaacagaagccagggcagtctcctaaattgttgatatattatgcatccaatcgctacactggagtccctgatcgcttcactggcagtggatatgggacggatttcactttcaccatcagcactgtgcaggctgaagacctggcagtttatttctgtcagcaggattatacctctccgtacacgttcggaggggggaccaagctggaaataaaa

SEQ ID NO: 640 - DNA, 321 bp, synthetic construct
  misc_feature 1..321: note = 6H6.2D6 VL DNA sequence
  source 1..321: mol_type = other DNA
gacatccagatgacccagaccacctcctccctgtccgcctccctgggcgacagggtgaccatctcctgctccgcctcccagggcatctccaactacctgaactggtaccagcagaagcccgacggcaccgtgaagctgctgatctactacacctcctccctgcactccggcgtgccctccaggttctccggctccggctccggcaccgactactccctgaccatctccaacctggagcccgaggacatcgccacctactactgccagcagtactccgagctgccctacaccttcggctccggcaccaagctggagatcaag

SEQ ID NO: 641 - DNA, 321 bp, synthetic construct
  misc_feature 1..321: note = 9H2.2H10 VL DNA sequence
  source 1..321: mol_type = other DNA
gacattgtgatgacccagtctcacaaattcatgtccacatcagtaggagacagggtcagcatcacctgcaaggccagtcaggatgtgagtactgctgtagcctggtatcaacaaaaaccagggcaatctcctaaactactgatttactgggcatccacccggcacactggagtccctgatcgcttcacaggcagtggatctgggacagattatactctcaccatcagcagtgtgcaggctgaagacctggcactttattactgtcagcaacattataccactccgctcacgttcggtgctgggaccaagctggagctgaaa

SEQ ID NO: 642 - DNA, 321 bp, synthetic construct
  misc_feature 1..321: note = 13G4.2F8 VL DNA sequence
  source 1..321: mol_type = other DNA
gacattgtgatgacccagtctcaaaaattcatgtccacatcagtaggagagagggtcagcatcacctgcaaggccagtcagaatgtaggtactaatgtagcctggtatcagcagaaagcagggcagtctcttgaactgctgatctatggggcatccaaccggcacactggagtccctgatcgcttcacaggcagtggatctgggacagatttcactctcaccatcaccaatgtgcagtctgaagacatgacaaattatttctgtgagcaatatagcaactttcctctcacgttcggtgctgggaccaagctggagctgaaa

SEQ ID NO: 643 - DNA, 336 bp, synthetic construct
  misc_feature 1..336: note = 13H12.2F8 VL DNA sequence
  source 1..336: mol_type = other DNA
gacgttgttatgacacaaacaccacttacactttctgtaactatcggtcagcctgcctcaatttcatgtaagtcttctcagtccctgtttcatagcgacgggaagacttacctgaattggcttctccaacgaccaggccaatcacccaagcgccttatttatttggtcagtaaattggacagtggagttcccgatagatttaccgggagcggttctgggaccgatttcaccccaaagatctccagggtagaagacgaagatctcggtgtgtactattgctggcaggggacacatttccctctgacattcggtgctggaaccaaacttgagatgaaa

SEQ ID NO: 644 - DNA, 321 bp, synthetic construct
  misc_feature 1..321: note = 15G7.2A7 VL DNA sequence
  source 1..321: mol_type = other DNA
gacatccagatgaaccagtctccatccagtctgtctgcatccctcggagacacaatttccatcacttgccgtgccagtcagaacattaatatttggttaagctggtaccagcagaaaccaggaaatattcctcaactattgatctataaggcttccaacttgcacacaggcgtcccctcaaggtttagtggcagtggatctggaacagatttcacattaaccatcagcagtctgcagcctgaagacattgccacttactactgtctacagggtcaaagttatcctctcacgttcggtgctgggaccaagctggtgatgaaa

SEQ ID NO: 645 - DNA, 330 bp, synthetic construct
  misc_feature 1..330: note = 19D9.2E5 VL DNA sequence
  source 1..330: mol_type = other DNA
gatgttgtgatgacccagactccactcactttgtcggttaccattggacaaccagcctccatctcttgtaagtcaagtcagagcctcttacatagtgatggaaagacatatttgaattggttgttacagaggccaggccagcctccaaagcgcctaatgtatctggtgtctacactggactctggagtccctgacaggttcactggcagtggatcagggacagatttcacactgaaaatcagcagagtggaggctgaggatttgggagtttattattgctggcaaggtacacattttcctctcacgttcggtgctgggaccaagccggag

SEQ ID NO: 646 - DNA, 330 bp, synthetic construct
  misc_feature 1..330: note = 23B10.2B12 VL DNA sequence
  source 1..330: mol_type = other DNA
gatattgtgatgacgcaggctgcattctccaatccagtcactcttggaacgtcagcttccatctcctgcaggtctagtaagagtctcctacatagtgatggcatcacttatttctattggtatctgcagaggccaggccagtctcctcagctcctgatatatcggatgtccaaccttgcctcaggagtcccagacaggttcagtggcagtgggtcaggaactgatttcacactgagaatcagcagagtggaggctgaggatgtgggtgtttattactgtgctcaaatgctagaattcccgctcacgttcggtgctgggaccaagctggag

SEQ ID NO: 647 - DNA, 321 bp, synthetic construct
  misc_feature 1..321: note = 24D12.2H9 VL DNA sequence
  source 1..321: mol_type = other DNA
gacattgtgatgacccagtctcacaaattcatgtccacatcagtaggagacagggtcagcatcacctgcaaggccagtcaggatgtgcgtactgctgtagcctggtatcaacagaaaccagggcaatctcctaaactactgatttactgggcatccacccggcacactggagtccctgatcgcttcacaggcagtggatctgggacagatttcactctcacccttagcaatgtgcagtctgaagacttggcagattatttctgtcagcaatatagtagttatccgtggacgttcggtggaggcaccaagctggaaatcaaa

SEQ ID NO: 648 - DNA, 336 bp, synthetic construct
  misc_feature 1..336: note = F846C.1B2 VL DNA sequence
  source 1..336: mol_type = other DNA
aacatttggttgacacagtcgccatcatctctggctgtgtctgcaggagaaatggtcactatgacctgtaagtccagtcaaagtgttttatacagttcaaatcagaagaactacttggcctggtaccagcagaaaccagggcagtctcctaaactgctgatctactgggcatccactagggaatctggtgtccctgatcgcttcacaggcagtggatctgggacagacttttctcttaccatcagcagtgtacaagctgaagacctggcagtttattactgtcatcaatatctctcctcgctcacgttcggtgctgggaccaagctggagctgaaa

SEQ ID NO: 649 - DNA, 336 bp, synthetic construct
  misc_feature 1..336: note = F846C.1F5 VL DNA sequence
  source 1..336: mol_type = other DNA
aacattatgatgacacagtcgccatcatctctggctgtgtctgcaggagaaaaggtcactatgagctgtaagtccagtcaaagtgttttatacagttcaaatcagaagaactacttggcctggtaccagcagaaaccagggcagtctcctaaactgctgatctactgggcatccactagggaatctggtgtccctgatcgcttcacaggcagtggatctgggacagattttactcttaccatcagcagtgtacaacctgaagacctggcagtttattactgtcatcaatacctctcctcgctcacgttcggtgctgggaccaagctggagctgaaa

SEQ ID NO: 650 - DNA, 336 bp, synthetic construct
  misc_feature 1..336: note = F846C.1H12 VL DNA sequence
  source 1..336: mol_type = other DNA
aacattatgatgacacagtcgccatcatctctggctgtgtctgcaggacaaaaggtcactatgagctgtaagtccagtcaaagtgttttatacagttcaagtcagaagaactacttggcctggtaccagcagaaaccagggcagtctcctaaacttctgatctactgggcatccactagggaatctggtgtccctgatcgcttctcaggcagtggatctgggacagattttactcttaccatcagcagtgtacaacctgaagacctggcagtttattactgtcatcaatacctctcctcgctcacgttcggtgctgggaccaagctggagctgaaa

SEQ ID NO: 651 - DNA, 336 bp, synthetic construct
  misc_feature 1..336: note = F846C.1H5 VL DNA sequence
  source 1..336: mol_type = other DNA
gatgttgtgatgacccaaactccactctccctgcctgtcagtcttggagatcaagcctccatctcttgcagatctagtcagagccttgtacacaatagtggaaacacctatttacattggtacctgcagaggccaggccagtctccaaacctcctgatctacaaagtttccaaccgattttctggggtcccagacaggttcagtggcagtggatcagggacagatttcacactcaagatcagcagagtggcggctgaggatctgggagtttatttctgctctcaaagtacacatgttcctccgacgttcggtggaggcaccaagctggaaatcaaa

SEQ ID NO: 652 - DNA, 336 bp, synthetic construct; identical to SEQ ID NO: 649
  misc_feature 1..336: note = F846C.2H3 VL DNA sequence
  source 1..336: mol_type = other DNA

SEQ ID NO: 653 - DNA, 327 bp, synthetic construct
  misc_feature 1..327: note = F846TC.14A2 VL DNA sequence
  source 1..327: mol_type = other DNA
caggctgttgtgactcaggaatctgcactcaccacatcacctggtgaaacagtcacactcacttgtcgctcaagtactggggctgttacaactagtaactatgccaactgggtccaagaaaaaccagatcatttattcactggtctaataggtggtatcaataaccgagttccaggtgttcctgccagattctcaggctccctgattggagacaaggcagccctcaccatcacaggggcacagactgaggatgaggcaatatatttctgtgctctatggtatagcaaccattgggtgttcggtggaggaaccaaactgactgtccta

SEQ ID NO: 654 - DNA, 336 bp, synthetic construct
  misc_feature 1..336: note = F846TC.14E4 VL DNA sequence
  source 1..336: mol_type = other DNA
gatattgtgatgacgcaggctgcattctccaatccagtcactcttggaacatcagcttccatctcctgcaggtctagtaagagtctcctacatactaatggcatcacttttttgtattggtatctgcagaagccaggccagtctcctcagcccctgatttatcagatgtccaaccttgcctcaggagtcccagacaggttcagtagcagtgggtcaggaactgatttcacactgagaatcagcagagtggaggctgaggatgtgggtgtttattactgtgctcaaaatctagaacttccttggacgttcggtggaggcaccaagctggaaatcaat

SEQ ID NO: 655 - DNA, 336 bp, synthetic construct
  misc_feature 1..336: note = F846TC.16B5 VL DNA sequence
  source 1..336: mol_type = other DNA
aacattatgatgacacagtcgccatcatctctggctgtgtctgcaggagaaaaggtcactatgagctgtaagtccagtcaaagtgttttatacagttcaaatcagaagaactacttggcctggtaccagcagaaaccagggcagtctcctaaactactgatctactgggcatccactagggaatctggtgtccctgatcgcttcacaggcagtggatctgggacagattttactcttaccatcagcagtgtacaagctgaagacctggcagtttattactgtcatcaatacctctcctcgctcacgttcggtgctgggaccaagctggagctgaaa

SEQ ID NO: 656 - DNA, 339 bp, synthetic construct
  misc_feature 1..339: note = F846TC.7F10 VL DNA sequence
  source 1..339: mol_type = other DNA
gacattgtgatgacacagtctccatcctccctggctatgtcagtaggacagaaggtcactatgagctgcaagtccagtcagagccttttaaatagtagcaatcaaaagaactatttggcctggtaccagcagaaaccaggacagtctcctaaacttctggtatactttgcatccactagggaatctggggtccctgatcgcttcataggcagtggatctgggacagatttcactcttaccatcagcagtgtgcaggctgaagacctggcagattacttctgtcagcaacattatagcactccgtacacgttcggagggggggccaagctggaaataaaa

SEQ ID NO: 657 - DNA, 321 bp, synthetic construct
  misc_feature 1..321: note = F847C.10B9 VL DNA sequence
  source 1..321: mol_type = other DNA
gacatccggatgactcagtctccatccagtctgtctgcatcccttggagacacaattaccatcacttgccatgccagtcagaacattaatgtttggttaagctggtaccagcagaaaccaggaaatattcctaaactattgatctataaggcttccaacttgcacacaggcgtcccatcaaggtttagtggcagtggatctggaacaggtttcacattaaccatcagcagcctgcagcctgaagacattgccacttactactgtcaacagggtcaaagttatccgtacacgttcggaggggggaccaagctggagctgaaa

SEQ ID NO: 658 - DNA, 321 bp, synthetic construct
  misc_feature 1..321: note = F847C.11B1 VL DNA sequence
  source 1..321: mol_type = other DNA
gaaattgtgttgacccagtctccagcatccctgtccgtgactacaggagaaaaagtcactatcagatgcataaccagcattgatattgatgatgatatgaactggtaccagcagaagccaggggaacctcctaagctccttatttcagaaggcaatactcttcgtcctggagtcccatcccgattctccagcagtggctatggcacagattttgtttttacaattgaaaacacgctctcagaagatgttgcagattactactgtttgcaaagtgataacaagcctctcacgttcggtgctgggaccaagctggagctgaaa

SEQ ID NO: 659 - DNA, 321 bp, synthetic construct
  misc_feature 1..321: note = F847C.12F12 VL DNA sequence
  source 1..321: mol_type = other DNA
gacatccaggtgattcagtctccatccagtctgtctgcatcccttggagacacaattaccatcacttgccatgccagtcagaacattaatgtttggttaagctggtaccagcagaaaccaggaaatattcctaaactattgatctataaggcttccaacttgcacacaggcgtcccatcaaggtttagtggcagtggatctggaacaggtttcacattaaccatcagcagcctgcagcctgaagacattgccacttactactgtcaacagggtcaaagttatccgtacacgttcggaggggggaccaagctggagctgaaa

SEQ ID NO: 660 - DNA, 321 bp, synthetic construct
  misc_feature 1..321: note = F847C.26F5 VL DNA sequence
  source 1..321: mol_type = other DNA
gaaattaagatgaaccagtctccatccagtctgtctgcatcccttggagacacaattaccatcacttgccatgccagtcagaacattaatgtttggttaagctggtaccagcagaaaccaggaaatattcctaaactattgatctataaggcttccaacttgcacacaggcgtcccatcaaggtttagtggcagtggatctggaacaggtttcacattaaccatcagcagcctacagcctgaagacattgccacttactactgtcaacagggtcaaagttatccgtacacgttcggaggggggaccaagctggagctgaaa

SEQ ID NO: 661 - DNA, 327 bp, synthetic construct
  misc_feature 1..327: note = F847C.4B10 VL DNA sequence
  source 1..327: mol_type = other DNA
caggctgttgtgactcaggaatctgcactcaccacatcacctggtgaaacagtcacactcacttgtcgctcaagtactggggctgttacaactagtaactatgccaactgggtccaagaaaaaccagatcatttattcactggtctaataggtggtaccaacaaccgagctccaggtgttcctgccagattctcaggctccctgattggagacaaggctgccctcaccatcacaggggcacagactgaggatgaggcaatatatttctgtgctctatggtacagcaaccatttagtgttcggtggaggaaccaaactgactgtccta

SEQ ID NO: 662 - DNA, 336 bp, synthetic construct
  misc_feature 1..336: note = F849C.8D10 VL DNA sequence
  source 1..336: mol_type = other DNA
gatgttttgatgacccaaactccactctccctgcctgtcagtcttggagatcaagcctccatctcttgcagatctagtcaggacattgtgcatagtagtggaaacacctatttagaatggtacctgcagaaaccaggccagtctctaaagctcctgatttacaaagtttccaaccgattttctggggtcccagacaggttcagtgccagtggatcagggacagatttcacactcaagatcagcagagtggaggctgaggatctgggagtttattactgctttcaaggttcacatgttcctcccacgttcggctcggggacaaagttggaaataaaa

SEQ ID NO: 663 - DNA, 336 bp, synthetic construct
  misc_feature 1..336: note = F849C.8H3 VL DNA sequence
  source 1..336: mol_type = other DNA
gatattgggatgaggcaggctgcattctccaatccagtcactcttggaacatcagcttccatctcctgcaggtctagtaagagtctcctatatagtaatggcatcacttatttgtattggtttctccagaagccaggccagtctcctcagctcctgatttatcagatgtccaaccttgcctcaggagtcccagacaggttcagtagcagtgggtcaggaactgatttcacactgagaatcagcagagtggaggctgacgatgtgggtgtttattactgtgctcaaaatctagaacttccgtggacgttcggtggaggcaccaagctggaaatcaaa

SEQ ID NO: 664 - DNA, 333 bp, synthetic construct
  misc_feature 1..333: note = 846.2B11 VL DNA sequence
  source 1..333: mol_type = other DNA
gacattgtgctgacacagtctcctgcttccttaggtgtttctctggggcagagggccaccatctcatgcagggccagcaaaagtgtcagtacatctggctatagttatatgcactggtaccaacagaaaccaggacagccacccaaactcctcatctatcttgcatccatcctagaatctggggtccctgccaggttcagtggcagtgggtctgggacagacttcaccctcaacatccatcctgtggaggaggaggatgctgcaatctattactgtcagcacagtagggagcttcctctcacgttcggtgctgggaccaagctggagctgaaa

SEQ ID NO: 665 - DNA, 333 bp, synthetic construct
  misc_feature 1..333: note = 846.4D5 VL DNA sequence
  source 1..333: mol_type = other DNA
aacattgtgctgacccaatctccagcttctttggctgtgtctctagggcagagggccaccatatcctgcagagccagtgaaagtgttgatagttatggcaatagttttatgcactggtaccagcagaaaccaggacagccacccaaactcctcatctatcttgcatccaacctagaatctggggtccctgccaggttcagtggcagtgggtctaggacagacttcaccctcaccattgatcctgtggaggctgatgatgctgcaacctattactgtcagcaaaataatgaggatccgtggacgttcggtggaggcaccaagctggaaatcaaa

SEQ ID NO: 666 - DNA, 336 bp, synthetic construct
  misc_feature 1..336: note = 846T.1H2 VL DNA sequence
  source 1..336: mol_type = other DNA
gatgttgtgatgacccagactccactcactttgtcggttaccattggacaaccagcctctatctcttgcaagtcaagtcagagtctcttatatagtaatggaaaaacctatttgaattggttattacagaggccaggccagtctccaaagcgcctaatctatctggtgtctaaactggactctggagtccctgacaggttcactggcagtggatcaggaacagattttacactgaaaatcagcagagtggaggctgaggatttgggagtttattactgcgtgcaaggtacacattttcctcagacgttcggtggaggcaccaagctggaaataaaa

SEQ ID NO: 667 - DNA, 327 bp, synthetic construct; identical to SEQ ID NO: 661
  misc_feature 1..327: note = 847.14H4 VL DNA sequence
  source 1..327: mol_type = other DNA

SEQ ID NO: 668 - DNA, 333 bp, synthetic construct
  misc_feature 1..333: note = 846.2D4 VL DNA sequence
  source 1..333: mol_type = other DNA
aacattgtgctcacccaatctccagcttctttggctgtgtctctagggcagagggccaccatatcctgcagagccagtgaaagtgttgatagttatggcaatagttttatgcactggtaccagcagaaaccaggacagccacccaaactcctcatctatcttgcatccaacctagaatctggggtccctgccaggttcagtggcagtgggtctaggacagacttcaccctcaccattgatcctgtggaggctgatgatgctgcaacctattactgtcagcaaaataatgaggatccgtggacgttcggtggaggcaccaagctggaaataaaa

SEQ ID NO: 669 - DNA, 321 bp, synthetic construct
  misc_feature 1..321: note = 846.2F11 VL DNA sequence
  source 1..321: mol_type = other DNA
gacatcctgatgacccaatctccatcctccatgtctgtatctctgggagacacagtcagcatcacttgccatgcaagtcagggcattaacagtaatatagggtggttgcagcagaaaccagggaagtcatttaagggcctgatctatcatggaaccaacttggaagatggagttccatcaaggttcagtggcagtggatctggagcagattattctctcaccatcagcagcctggaatctgaagattttgcggactattactgtgtacagtatgatcagtttccgtggacgttcggtggaggcaccaagctggaaatcaaa

SEQ ID NO: 670 - DNA, 333 bp, synthetic construct
  misc_feature 1..333: note = 846T.10B1 VL DNA sequence
  source 1..333: mol_type = other DNA
gacattgtgatgtcacagtctcctgcttccttaggtgtttctctggggcagagggccaccatctcatgcagggccagcaaaagtgtcagtacatctggctatagttatatgcactggtaccaacagaaaccaggacagccacccaaactcctcatctatcttgcatccatcctagaatctggggtccctgccaggttcagtggcagtgggtctgggacagacttcaccctcaacatccatcctgtggaggaggaggatgctgcaatctattactgtcagcacagtagggagcttcctctcacgttcggtgctgggaccaagctggagctgaaa

SEQ ID NO: 671 - DNA, 333 bp, synthetic construct
  misc_feature 1..333: note = 846T.2E3 VL DNA sequence
  source 1..333: mol_type = other DNA
gacattgtgctgacacagtctcctgcttccttagctgtatctctggggcagagggccaccatctcatgcagggccagcaaaagtgtcagtacatctggctatagttatatgcactggtaccaacagaaaccaggacagccacccaaactcctcatctatcttgcatccatcctagaatctggggtccctgccaggttcagtggcagtgggtctgggacagacttcaccctcaacatccatcctgtggaggaggaggatgctgcaacctattactgtcagcacagtagggagcttcctctcacgttcggtgctgggaccaagctggagctgaaa

SEQ ID NO: 672 - DNA, 321 bp, synthetic construct
  misc_feature 1..321: note = 846T.4C9 VL DNA sequence
  source 1..321: mol_type = other DNA
gacattttgatgacccaaactccatcctccatgtctgtatctctgggagacacagtcagcatcacttgccatgcaagtcagggcattagcagtaatatagggtggttgcagcagaaaccacggaaatcatttaagggcctgatctattatggaaccaacttggaagatggagttccatcaaggttcagtggcagtggatctggagcagattattctctcaccatcagcagcctggaatctgaagattttgcagactattactgtgtacagtatgatcagtttccgtggacgttcggtggaggcaccaagctggaaataaaa

SEQ ID NO: 673 - DNA, 333 bp, synthetic construct
  misc_feature 1..333: note = 846T.4E11 VL DNA sequence
  source 1..333: mol_type = other DNA
gacattgtgctgacacagtctcctgcttccttagctgtatctctggggcagagggccaccatctcatgcagggccagcaaaagtgtcagtacatctggctatagttgtatgcactggtaccaacagaaaccaggacagccacccaaactcctcatctatcttgcatccaacctagaatctggggtccctgccaggttcagtggcggtgggtctgggacagacttcaccctcagcatccatcctgtggaggaggaggatgctgcaacctattactgtcaccacagtacggagcttccgtacacgttcggaggggggaccaagctggaagtagaa

SEQ ID NO: 674 - DNA, 333 bp, synthetic construct
  misc_feature 1..333: note = 846T.4F5 VL DNA sequence
  source 1..333: mol_type = other DNA
gacattgtgctgacccaatctccagcttctttggctgtgtctctagggcagagggccaccatatcctgcagagccagtgaaagtgttgatagttatggcaatagttttatgcactggtaccagcagaaaccaggacagccacccaaactcctcatctatcttgcatccaacctagaatctggggtccctgccaggttcagtggcagtgggtctaggacagacttcaccctcaccattgatcctgtggaggctgatgatgctgcaacctattactgtcagcaaaataatgaggatccgtggacgttcggtggaggcaccaagctggaaatcaaa

SEQ ID NO: 675 - DNA, 324 bp, synthetic construct
  misc_feature 1..324: note = 846T.8D1 VL DNA sequence
  source 1..324: mol_type = other DNA
gacattgtgctgacacagtctcctgcttccttagctgtatctctggggcagagggccaccatctcatgcagggccagcaaaagtgtcagtacatctggctatagttatatgcactggtaccaacagaaaccaggacagccacccaaactcctcatctatcttgcatccatcctagaatctggggtccctgccaggttcagtggcagtgggtctgggacagacttcaccctcaacatccatcctgtggaggaggaggatgctgcaacctattactgtcagcacagtagggagcttcctctcacgttcggtgctgggaccaagctg

SEQ ID NO: 676 - DNA, 333 bp, synthetic construct
  misc_feature 1..333: note = 847.10C9 VL DNA sequence
  source 1..333: mol_type = other DNA
gatgttgtgatgacccagactccactcactttgtcggttaccattggacaaccagcctctatctcttgcaagtcaagtcagagcctcttatatagtgatggaaaaacctatttgaattggttattacagaggccaggccagtctccaaagcgcctaatctatctggtgtctcaactggactctggagtccctgacaggttcactggcagtggatcaggaacagattttacactgaaaatcagcagagtggaggctgatgatttgggagtttattgctgcgtgcaaggtacacatcttcccacgttcggaggggggaccaagctggaaataaaa

SEQ ID NO: 677 - DNA, 333 bp, synthetic construct
  misc_feature 1..333: note = 847.11D6 VL DNA sequence
  source 1..333: mol_type = other DNA
gacattgtgatgacacagtctcccgcttctttggctgtgtctctagggcagagggccaccatatcctgcagagccagtgaaagtgttgaaaatcatgtcaatagttttatgcactggttccaacagaaaccaggacagccacccaaactcctcatctatcgtgcatccaacctacaatctgggatccctgccaggttcagtggcagtgggtctaggacagacttcaccctcaccattaatcctgtggaggctgatgatgttgcaacctattactgtcagcaaaataatgaggtcccgtacacgttcggaggggggaccaagctggaaataaaa

SEQ ID NO: 678 - DNA, 327 bp, synthetic construct
  misc_feature 1..327: note = 847.15D12 VL DNA sequence
  source 1..327: mol_type = other DNA
caggctgttgtgactcaggaatctgcactcaccacatcacctggtgaaacagtcacactcacttgtcgctcaagtactggggctgttacaactagtaactatgccaactgggtccaagaaaaaccagatcatttattcactggtctaataggtggtaccaacaaccgagctccaggtgttcctgccagattctcaggctccctgattggagacaaggctgccctcaccatcacaggggcacagactgaggatgaggcaatatatttctgtgctctatggtacagcaaccatttggtgttcggtggaggaaccaaactgactgtccta

SEQ ID NO: 679 - DNA, 318 bp, synthetic construct
  misc_feature 1..318: note = 847.15F9 VL DNA sequence
  source 1..318: mol_type = other DNA
caaattgttctctcccagtctccagcaatcctgtctgcatctccaggggagaaggtcacaatgacttgcagggccagctcaagtgtaacttacatgtactggtaccagcagaagccaggatcctccccccaaccctggatttatgccacatccaacctggcttctggagtccctgctcgcttcagtggcagtgggtctgggacctcttactctctcacaatcagcagagtggaggctgaagatgctgccacttattactgccagcagtggagtagtaacccactcacgttcggtgctgggaccaagctggagctgaaa

SEQ ID NO: 680 - DNA, 333 bp, synthetic construct
  misc_feature 1..333: note = 847.15H11 VL DNA sequence
  source 1..333: mol_type = other DNA
gacattgtgctaacacagtctccagcttctttggctgtgtctctagggcagagggccaccatctcctgcagagccagcgaaagtcttgataattctggcattagttttatgaactggttccaacagagaccaggacagccacccaaactcctcatctatgctgcatccaacctagaatccggggtccctgccaggtttagtggcagtgggtctgggacagacttcagcctcaacatccatcctatggaggaggatgatgctgcaatgtatttctgtcagcacagtaaggaggttccgtggacgttcggtggaggcaccaagctggaaatcaaa

SEQ ID NO: 681 - DNA, 321 bp, synthetic construct
  misc_feature 1..321: note = 847.20H7 VL DNA sequence
  source 1..321: mol_type = other DNA
gacattgtgatgacccagtctcacaaaatcatgtccacatcagtaggagacagggtcagcatcacctgcaaggccagtcaggatgtgagtaccactgtggcctggtttcagcaaaaaccaggacaatctcctaaactactgctttactgggcatccacccggcacactggagtccctgatcgcttcacaggcagtggatctgggacagattatactctcaccatcagcagtgtccaggctgaagacctggcactttattactgtcagcaacattatagccctccattcacgttcggctcggggaccaagctggaaataaaa

SEQ ID NO: 682 - DNA, 321 bp, synthetic construct
  misc_feature 1..321: note = 847.21B11 VL DNA sequence
  source 1..321: mol_type = other DNA
gacattgtgatgactcagtctcaaaaattcatgtccacatcagtaggagacagggtcagcgtcacctgcaaggccagtcagaatgtgggtattaatgtagcctggtatcaacagaaaccagggcaatctcctaaagcactgatttactcggcatcctaccggtacagtggagtccctgatcgcttcacaggcagtggatctgggacagatttcactctcaccatcagcaatgtgcagtctgaagacttggcagagtatttctgtcagcaatataatagttatccgtacacgttcggaggggggaccaagctggaaatgaaa

SEQ ID NO: 683 - DNA, 336 bp, synthetic construct
  misc_feature 1..336: note = 847.27B9 VL DNA sequence
  source 1..336: mol_type = other DNA
gacgttgtgatgacccagactccactcactttgtcggttacccttggacaacccgcctccatctcttgcaggtcaagtcagagcctcttagatagtgatggaaagacatatttgaattggttgttacagaggccaggccagtctccaaagcgcctaatctatttggtgtctagactggactctggagtccctgacaggttcactggcagtggatcagggacagatttcacactgaaaatcagcagagtggaggctgaggatctgggagtttattattgctggcaaggtacacattttccgttcacgttcggaggggggaccaagctggaaataaaa

SEQ ID NO: 684 - DNA, 321 bp, synthetic construct
  misc_feature 1..321: note = 847.28D1 VL DNA sequence
  source 1..321: mol_type = other DNA
gacatccggatgactcagtctccagcctccctatctgcatctgtgggagaaactgtcaccatcacatgtcgagcaagtgggaatattcacaattatttagcatggtatcatcagaaacagggaaaatctcctcagctcctggtctataatgtaaaaaccttagcagatggtgtgccatcaaggttcagtggcagtggatcaggaacacaattttctctcaagatcaacagtttgcagcctgaagattttgggacttattattgtcaacatttttggagtatttttccgacgttcggtggaggcaccaagctggaaataaaa

SEQ ID NO: 685 - DNA, 318 bp, synthetic construct
  misc_feature 1..318: note = 847.2B8 VL DNA sequence
  source 1..318: mol_type = other DNA
caaattcttctctcccagtctccagcaatcctgtctgcatctccaggggagaaggtcacaatgacttgcagggccagctcaagtgtaacttacatgtactggtaccagcagaagccaggatcctccccccaaccctggatttatgccacatccaacctggcttctggagtccctgctcgcttcagtggcagtgggtctgggacctcttactctctcacaatcagcagagtggaggctgaagatgctgccacttattactgccagcagtggagtagtaacccactcacgttcggtgctgggaccaagctggagctgaaa

SEQ ID NO: 686 - DNA, 315 bp, synthetic construct
  misc_feature 1..315: note = 847.3B3 VL DNA sequence
  source 1..315: mol_type = other DNA
gacattttgatgactcagtctccagcctccctatctgcatctgtgggagaaactgtcaccatcacatgtcgagcaagtgggaatattcacaattatttagcatggtatcagcagaaacagggaaaatctcctcaactcctggtctatagtgcaaaaaccttagcagatggtgtgccatcaaggttcagtggcagtggatcaggaacacaattttctctcaagatcgacagcctgcagcctgaagattttgggacttattactgtcaacatttttggagtctttttccgacgttcggtggaggcaccaagctggaa

SEQ ID NO: 687 - DNA, 321 bp, synthetic construct
  misc_feature 1..321: note = 849.1D2 VL DNA sequence
  source 1..321: mol_type = other DNA
gacgttgtgatgacccagactcccaaattcctgcttgtatcagcaggagacagggttaccataacctgcaaggccagtcaaagtgtgagtagtgatgtagcttggtaccaacagaagccagggcagtctcctaaactgctgatatactttgcatccaatcgctacactggagtccctgatcgcttcactggcagtggatatgggacggatttcactttcaccatcagcactgtccaggctgaagacctggcagtttatttctgtcagcataattatatctctccgttcacgttcggaggggggaccaagctggaaataaaa

SEQ ID NO: 688 - DNA, 321 bp, synthetic construct
  misc_feature 1..321: note = 849.2D7 VL DNA sequence
  source 1..321: mol_type = other DNA
gacattgtgatgacccagtctcacaaattcatgtccacatcagtaggagacagggtcagcatcacctgcaaggccagtcaggatgtgagtactgctgtagcctggtatcaacaaaaaccagggcaatctcctaaactactgatttactgggcatccacccggcacactggagtccctgatcgcttcacaggcagtggatctgggacagattatactctcaccatcagcagtgtgcaggctgaagacctggcactttattactgtcagcaacattatagcactccgtacacgttcggaggggggaccaagctggaaataaaa

SEQ ID NO: 689 - DNA, 321 bp, synthetic construct
  misc_feature 1..321: note = 849.2F12 VL DNA sequence
  source 1..321: mol_type = other DNA
gacattgcgatgacccagtctcacaaattcatgtccacatcagtaggagacagggtcagcatcacctgcaaggccagtcaggatgtgagtactgctgtagcctggtatcaacaaaaaccagggcaatctcctaaactactgatttactgggcatccacccggcacactggagtccctgatcgcttcacaggcagtggatctgggacagattatactctcaccatcagcagtgtgcaggctgaagacctggcactttattactgtcagcaacattataacactccgtacacgttcggaggggggaccaagctggaaataaaa

SEQ ID NO: 690 - DNA, 336 bp, synthetic construct
  misc_feature 1..336: note = 849.4B2 VL DNA sequence
  source 1..336: mol_type = other DNA
gatgtggggatgacccagactccactcattttgtcggttaccattggacaaccagcttccatctcttgcaagtcaagtcagagcctcttatatattaatggaaaaacctatttgaattggttattacagaggccaggccagtctccaaaacgcctaatctatctggtgtctaaattggactctggagtccctaacagattcagtggcagtggatcagggacagatttcacactgaaaatcagcagagtggaggctgaggatttgggagtttattactgcttgcagagtacacattttcctcagacgttcggtggaggcaccaagctggaaatcaaa

SEQ ID NO: 691 - DNA, 321 bp, synthetic construct
  misc_feature 1..321: note = 849.4F12 VL DNA sequence
  source 1..321: mol_type = other DNA
gacatcctgctgacccagtctccatcctccatgtctgtatctctgggagacacagtcagcatcacttgccatgcaagtcagggcattaacagtaatatagggtggttgcagcagaaaccagggaagtcatttaagggcctgatctatcatggaaccaacttggaagatggagttccatcaaggttcagtggcagtggatctggagcagattattctctcaccatcagcagcctggaatctgaagattttgcggactattactgtgtacagtatgatcagtttccgtggacgttcggtggaggcaccaagctggaaatcaaa

SEQ ID NO: 692 - DNA, 336 bp, synthetic construct
  misc_feature 1..336: note = 849.4F2 VL DNA sequence
  source 1..336: mol_type = other DNA
gatgttgggatgacccagactccactcattttgtcggttaccattggacaaccagcttccatctcttgcaagtcaagtcagagcctcttatatattaatggaaaaacctatttgaattggttattacagaggccaggccagtctccaaaacgcctaatctatctggtgtctaaattggactctggagtccctaacagattcagtggcagtggatcagggacagatttcacactgaaaatcagcagagtggaggctgaggatttgggagtttattactgcttgcagagtacacattttcctcagacgttcggtggaggcaccaagctggaaatcaaa

SEQ ID NO: 693 - DNA, 336 bp, synthetic construct
  misc_feature 1..336: note = 849.5C2 VL DNA sequence
  source 1..336: mol_type = other DNA
gatattgtgatgactcaggctgcaccctctgtacctgtcactcctggagagtcagtatccatctcctgcaggtctagtaggagtctcctgcatagtaatggctacacttacttgtattggttcctgcagaggccaggccagtctcctcggctcctgatatatcggatgtccaaccttgcctcaggagtcccagacaggttcagtggcagtgggtcaggaactgctttcacactgagaatcagtagagtggaggctgaggatgtgggtgtttattactgtatgcaacatctagaatatccgtacacgttcggaggggggaccaagctggaaataaaa

SEQ ID NO: 694 - DNA, 318 bp, synthetic construct
  misc_feature 1..318: note = 849.8D12 VL DNA sequence
  source 1..318: mol_type = other DNA
gacatccagatgacacagactacatcctccctgtctgcctctctgggagacagagtcaccatcagttgcagtgcaagtcagggcattagcaattatttaaactggtatcagcagaaaccagatggaactgttaaactcctgatctattacacatcaagtttacactcaggagtcccatcaaggttcagtggcagtgggtctgggacagattattctctcaccatcagcaacctggaacctgaagatattgccacttactattgtcagcagtatagtaagcttcctcggacgttcggtggaggcaccaagctggaaatc

SEQ ID NO: 695 - DNA, 336 bp, synthetic construct
  misc_feature 1..336: note = F847C.21H6 VL DNA sequence
  source 1..336: mol_type = other DNA
gatgttgtgatgacccagactccactcactttgtcggttaccattggacaaccagcctccatctcttgcaagtcaagtcggagcctcttagatagtgatggaaagacatatttgaattggttgttacagaggccaggccagtctccaaagcgcctaatctatctggtgtccaaactggactctggagtccctgacaggttcactggcagtggatcagggacagatttcacactgaaaatcagcagagtggaggctgaggatttgggagtttattattgctggcaaggtacacattttcctcagacgttcggtggaggcaccaagctggaaatcaat

SEQ ID NO: 696 - DNA, 321 bp, synthetic construct
  misc_feature 1..321: note = 849.5H1 VL DNA sequence
  source 1..321: mol_type = other DNA
gacatccagatgaaccagtctccatccagtctgtctgcatcccttggagacacaattaccatcacttgccatgccagtcagaacattaatgtttggttaagctggtaccagcagaaaccaggaaatattcctaaactattgatctatcaggcttccaacttacacacaggcgtcccatcaaggtttagtggccgtggatctggaacaggtttcacattaaccatcagcagcctgcagcctgaagacattgccacttactactgtcaacagggtcaaagttctccattcacgttcggctcggggacaaagttggaaataaaa

SEQ ID NO: 697 - DNA, 321 bp, synthetic construct
  misc_feature 1..321: note = 847.23F11 VL DNA sequence
  source 1..321: mol_type = other DNA
gacattttgatgacccagtctcacaaattcatgtccacatcagtaggagacagggtcagcatcacctgcaaggccagtcaggatgtgagttctgttgtagtctggtatcaacaaaaaccaggacaatctcctaaacaactaatttactgggcatccacccggcacactggagtccctgatcgcttcacaggcagtggatctgggacagattatactctcaccatcagcagtgtgcaggctgaagacctggcactttattactgtcagcaacattatagcacgccgtacacgttcggaggggggaccaagctggaaataaaa

SEQ ID NO: 698 - DNA, 327 bp, synthetic construct
  misc_feature 1..327: note = 847.16D10 VL DNA sequence
  source 1..327: mol_type = other DNA
caggctgttgtgactcaggaatctgcactcaccacatcacctggtgaaacagtcacactcacttgtcgctcaagtactggggctgttacaactagtaactatgccaactgggaccaagaaaaaccagatcatttattcactggtctaataggtggtaccaacaaccgagctccaggtgttcctgccagattctcaggctccctgattggagacaaggctgccctcaccatcacaggggcacagactgaggatgaggcaatatatttctgtgctctatggtacagcaaccatttggtgttcggtggaggaaccaaggtcactgtccta

SEQ ID NO: 699 - DNA, 333 bp, synthetic construct
  misc_feature 1..333: note = 847.13E2-mH0mL1 VL DNA sequence
  source 1..333: mol_type = other DNA
gacattgtgatgacacagtctcctgcttccttacctgtatctctggggcagagggccaccatctcatgcagggccagcaaaagtgtcactacatctgcctatagttatatacactggtaccaacagagaccaggacagccacccaaactcctcatctatcttgcatccaacctagaatctggggtccctgccaggttcagtggcagtgggtctgggacagacttcaccctcaacatccatcctgtggaggaggaggatgctgcaacctattactgtcagcacaatagggagcttcctccgacgttcggtggaggcaccaagctggaaatcaat

SEQ ID NO: 700 - DNA, 321 bp, synthetic construct
  misc_feature 1..321: note = 847.13E2-mH0mL2 VL DNA sequence
  source 1..321: mol_type = other DNA
gatattgtgctaactcagtctccagccaccctgtctgtgactccaggagatagcgtcagtttttcctgcagggccagccaaattattaacaacaacctacactggtatcaacaaaaatcacatgagtctcctaggcttctcatcaggtatacttcccagtccatctctgggatcccctccaggttcagtggcagtggatcagggacagatttcactctcagtatcaacaatgtggagactgaagattttggaatgtatttctgtcaacagactaacagctggcctctcacgttcggtgctgggaccaagctggagctgaaa

SEQ ID NO: 701 - DNA, 333 bp, synthetic construct
  misc_feature 1..333: note = 847.12C4 VL DNA sequence
  source 1..333: mol_type = other DNA
gatgttgtgatgacccagactccactcactttgtcggttaccattgaacaaacagcctccatctcttgcaagtcaagtcagagcctcttagatcgtgatggaaagacatatttgaattggttgttacagaggccaggccagtctccaaagcgcctaatctatctggtgtctaaactggactctggagtccctgacaggttcactggcagtggatcagggacagatttcacactgaaaatcagcagagtggaggctgaggatttgggagtttattattgctggcaaggtacacattttccgacgttcggtggaggcaccaagctggaaatcaaa

SEQ ID NO: 702 - DNA, 321 bp, synthetic construct
  misc_feature 1..321: note = 847.4D3 VL DNA sequence
  source 1..321: mol_type = other DNA
gatgttgtgatgacccaaactcccaaattcctgcctataacagcagaagacagggttaccattacctgcaaggccagtcagagtgtgagtaatgaagtagcttggtaccaacagaagccagggcagtctcctaaactgctgatatactatgcatccaatcgctacactggagtccctgatcgcttcactggcagtggatctggcacggatttcactttcaccatcagaagtgtgcaacttgaagacctggcagtttatttctgtcagcagcattatagctctccgtggacgttcggtggaggcaccaagctggaaatcaaa

SEQ ID NO: 703 - DNA, 1332 bp, synthetic construct
  misc_feature 1..1332: note = TB001 heavy chain DNA sequence
  source 1..1332: mol_type = other DNA
caggtgcagctggtgcagtccggctccgagctgaaaaaacccggcgcctccgtgaaagtgtcctgcaaagcctccggctacacattcacaaactacggcatgaactgggtgaggcaggcccccggccagggcctgaaatggatgggctggatcaacacaaacacaggcgagcccacatacgtggaggagttcacaggcaggttcgtgttctccctggagacatccgtgtccacagcctacctgcagatctcctccctgaaagccgaggacacagccgtgtacttctgcgccccctacgacaacttcttcgcctactggggccagggcacaacagtgacagtgtcctccgcttccaccaagggacccagcgtgttccctctggctccttgctccagatccacctccgagtctacagctgctctgggctgcctggtcaaggactactttcctgagcctgtgaccgtgtcctggaactctggcgctctgacatctggcgtgcacacctttccagctgtgctgcagtcctccggcctgtactctctgtcctctgtcgtgaccgtgccttcctctagcctgggcaccaagacctacacctgtaatgtggaccacaagccttccaacaccaaggtggacaagcgcgtggaatctaagtacggccctccttgtcctccatgtcctgctccagagtttctcggcggaccctccgtgttcctgtttcctccaaagcctaaggacaccctgatgatctctcggacccctgaagtgacctgcgtggtggtggatgtgtcccaagaggatcccgaggtgcagttcaattggtacgtggacggcgtggaagtgcacaacgccaagaccaagcctagagaggaacagttcaactccacctacagagtggtgtccgtgctgaccgtgctgcaccaggattggctgaacggcaaagagtacaagtgcaaggtgtccaacaagggcctgccttccagcatcgaaaagaccatctccaaggccaagggccagcctagggaaccccaggtttacaccctgcctccaagccaagaggaaatgaccaagaaccaggtgtccctgacctgcctcgtgaagggcttctacccttccgatatcgccgtggaatgggagagcaatggccagcctgagaacaactacaagacaacccctcctgtgctggactccgacggcagcttcttcctgtattcccgcctgaccgtggacaagtccagatggcaagagggcaacgtgttcagctgctccgtgatgcacgaggccctgcacaatcactacacccagaagtccctgtctctgtccctgggctgatga

SEQ ID NO: 704 - DNA, 1341 bp, synthetic construct
  misc_feature 1..1341: note = TB006 heavy chain DNA sequence
  source 1..1341: mol_type = other DNA
cagattcaattggttcagagcggctcagaactgaaaaagcctggagccagcgttaaagtgagctgtaaagccagtggatacacattcaccacttacgtcatgtcctgggttagacaggcccctggacaggggctggaatggatgggctggataaacactcactctggagtgcccacatacgccgacgactttacaggcaggttcgtgttttccctagatactagtgtgaatactgcatacttgcaaatctcttctctgaaagcagaggataccgccgtgtacttttgcacccgcgatgggaatgatggggatgccatggacaactggggccaggggacgactgtgacagtgtcttcagctagcaccaagggccccagcgtgtttcctctcgctccctgcagccggagcacatccgagagcaccgctgctctgggctgtctcgtgaaggactacttccctgaacccgtcaccgtcagctggaatagcggcgccctgacatccggcgtccacacattccccgctgtcctgcagagcagcggcctgtacagcctgagctccgtggtcaccgtgcctagcagcagcctgggaacaaagacctacacctgcaacgtggaccataagccctccaacaccaaggtggacaagcgggtggaatccaagtatggacccccctgtcctccttgccctgctcctgaatttctcggaggcccctccgtcttcctgtttccccccaagcccaaggacaccctgatgatctcccggacacccgaagtcacctgcgtcgtggtggatgtcagccaggaagatcccgaggtgcagttcaactggtacgtggacggagtggaggtgcataacgccaaaaccaagcccagggaagagcagttcaacagcacctatcgggtcgtgtccgtgctcaccgtcctgcatcaggattggctcaacggcaaggagtacaagtgcaaggtgtccaacaagggcctgccctcctccatcgagaagaccatctccaaggctaagggccaacctcgggagccccaagtgtataccctccctcccagccaggaggagatgaccaagaatcaagtgagcctgacctgcctcgtgaagggattttacccctccgacatcgctgtggaatgggaaagcaatggccaacctgagaacaactacaagaccacaccccccgtgctggactccgatggctccttcttcctgtacagcaggctgaccgtggacaaatcccggtggcaagagggaaacgtgttcagctgctccgtgatgcacgaggctctccacaaccactacacccagaagagcctctccctgagcctcggctagtaa

SEQ ID NO: 705 - DNA, 1350 bp, synthetic construct
  misc_feature 1..1350: note = 12G5.D7 heavy chain DNA sequence
  source 1..1350: mol_type = other DNA
caggtgcagctgaagcagtctggggctgagctggtgaggcctggggcttcagtgaagctgtcctgcaaggcttctggctacactttcactgactactatataaactgggtgaagcagaggcctggacagggacttgagtggattgcaaggatttatcctggaactggtaatactgactacaatgagaagttcaagggcagggccacactgactgcagaaaactcctccagcactgcctacatgcagctcagcagtctgacatctgaggactctgctgtctatttctgtgcaagatttgcgtattactacggtagtggagggtactttgactactggggccacggcaccactctcacagtctcctcagctagcaccaagggccccagcgtgtttcctctcgctccctgcagccggagcacatccgagagcaccgctgctctgggctgtctcgtgaaggactacttccctgaacccgtcaccgtcagctggaatagcggcgccctgacatccggcgtccacacattccccgctgtcctgcagagcagcggcctgtacagcctgagctccgtggtcaccgtgcctagcagcagcctgggaacaaagacctacacctgcaacgtggaccataagccctccaacaccaaggtggacaagcgggtggaatccaagtatggacccccctgtcctccttgccctgctcctgaatttctcggaggcccctccgtcttcctgtttccccccaagcccaaggacaccctgatgatctcccggacacccgaagtcacctgcgtcgtggtggatgtcagccaggaagatcccgaggtgcagttcaactggtacgtggacggagtggaggtgcataacgccaaaaccaagcccagggaagagcagttcaacagcacctatcgggtcgtgtccgtgctcaccgtcctgcatcaggattggctcaacggcaaggagtacaagtgcaaggtgtccaacaagggcctgccctcctccatcgagaagaccatctccaaggctaagggccaacctcgggagccccaagtgtataccctccctcccagccaggaggagatgaccaagaatcaagtgagcctgacctgcctcgtgaagggattttacccctccgacatcgctgtggaatgggaaagcaatggccaacctgagaacaactacaagaccacaccccccgtgctggactccgatggctccttcttcctgtacagcaggctgaccgtggacaaatcccggtggcaagagggaaacgtgttcagctgctccgtgatgcacgaggctctccacaaccactacacccagaagagcctctccctgagcctcggctagtaa

SEQ ID NO: 706 - DNA, 1341 bp, synthetic construct
  misc_feature 1..1341: note = 13A12.2E5 heavy chain DNA sequence
  source 1..1341: mol_type = other DNA
cagatccagttggtacagtctggacctgagctgaagaagcctggagagacagtcaagatctcctgcaagacttctgggtataaattcaaaacctatgtgatgagctgggtgaaacaggctccaggaaaggctttaaagtggatgggctggataaacacctactctggagtgccaacatatgctgatgacttcaagggacgatttgccttctctttggaaacctctgccagcactgcctatttggagatcatcaacctcaaaaatgaggacacggctacatatttctgtgcaagagatggtaactacggggatcctatggactactggggtcaaggaacctcagtcaccgtctcctcagctagcaccaagggccccagcgtgtttcctctcgctccctgcagccggagcacatccgagagcaccgctgctctgggctgtctcgtgaaggactacttccctgaacccgtcaccgtcagctggaatagcggcgccctgacatccggcgtccacacattccccgctgtcctgcagagcagcggcctgtacagcctgagctccgtggtcaccgtgcctagcagcagcctgggaacaaagacctacacctgcaacgtggaccataagccctccaacaccaaggtggacaagcgggtggaatccaagtatggacccccctgtcctccttgccctgctcctgaatttctcggaggcccctccgtcttcctgtttccccccaagcccaaggacaccctgatgatctcccggacacccgaagtcacctgcgtcgtggtggatgtcagccaggaagatcccgaggtgcagttcaactggtacgtggacggagtggaggtgcataacgccaaaaccaagcccagggaagagcagttcaacagcacctatcgggtcgtgtccgtgctcaccgtcctgcatcaggattggctcaacggcaaggagtacaagtgcaaggtgtccaacaagggcctgccctcctccatcgagaagaccatctccaaggctaagggccaacctcgggagccccaagtgtataccctccctcccagccaggaggagatgaccaagaatcaagtgagcctgacctgcctcgtgaagggattttacccctccgacatcgctgtggaatgggaaagcaatggccaacctgagaacaactacaagaccacaccccccgtgctggactccgatggctccttcttcctgtacagcaggctgaccgtggacaaatcccggtggcaagagggaaacgtgttcagctgctccgtgatgcacgaggctctccacaaccactacacccagaagagcctctccctgagcctcggctagtaa

SEQ ID NO: 707 - DNA, 1335 bp, synthetic construct
  misc_feature 1..1335: note = 14H10.2C9 heavy chain DNA sequence
  source 1..1335: mol_type = other DNA
cagatccagttggtacagtctggacctgagctgaagaagcctggagagacagtcaagatctcctgcaaggcttctgggtataccttcacaacctatggaatgggctgggtgaaacaggctccaggaaaggatttaaagtggatgggctggataaacacctactctggagtgccaacatatgctgatgacttcaagggacggtttgccttctctttggaaacctctgccagcactgcctatttgcagatcagcaacctcaaaaatgaagacacggctacatatttctgttcaaccccttatgaatacgacggggcttactggggccaggggactctggtcactgtctctgcagctagcaccaagggccccagcgtgtttcctctcgctccctgcagccggagcacatccgagagcaccgctgctctgggctgtctcgtgaaggactacttccctgaacccgtcaccgtcagctggaatagcggcgccctgacatccggcgtccacacattccccgctgtcctgcagagcagcggcctgtacagcctgagctccgtggtcaccgtgcctagcagcagcctgggaacaaagacctacacctgcaacgtggaccataagccctccaacaccaaggtggacaagcgggtggaatccaagtatggacccccctgtcctccttgccctgctcctgaatttctcggaggcccctccgtcttcctgtttccccccaagcccaaggacaccctgatgatctcccggacacccgaagtcacctgcgtcgtggtggatgtcagccaggaagatcccgaggtgcagttcaactggtacgtggacggagtggaggtgcataacgccaaaaccaagcccagggaagagcagttcaacagcacctatcgggtcgtgtccgtgctcaccgtcctgcatcaggattggctcaacggcaaggagtacaagtgcaaggtgtccaacaagggcctgccctcctccatcgagaagaccatctccaaggctaagggccaacctcgggagccccaagtgtataccctccctcccagccaggaggagatgaccaagaatcaagtgagcctgacctgcctcgtgaagggattttacccctccgacatcgctgtggaatgggaaagcaatggccaacctgagaacaactacaagaccacaccccccgtgctggactccgatggctccttcttcctgtacagcaggctgaccgtggacaaatcccggtggcaagagggaaacgtgttcagctgctccgtgatgcacgaggctctccacaaccactacacccagaagagcctctccctgagcctcggctagtaa

SEQ ID NO: 708 - DNA, 1323 bp, synthetic construct
  misc_feature 1..1323: note = 15F10.2D6 heavy chain DNA sequence
  source 1..1323: mol_type = other DNA
gaagtacagctggtggagtctgggggaggcttagtgaagcctggagggtccctgaaactctcctgtgcagcctctggattcgctttcagttcctatgccatgtcttgggttcgccagactccggaaaagaggctggagtgggtcgcaaccattagtgatggtggtgtttacacctactatacagaccatgtaaagggccgattcaccatctccagagacaatgccgaggacaacctgtacctgcaaatgagccatctgaagtctgaggacacagccatgtattattgtgtgagagatgggggctactggggccaaggcaccactctcacagtctcctcagctagcaccaagggccccagcgtgtttcctctcgctccctgcagccggagcacatccgagagcaccgctgctctgggctgtctcgtgaaggactacttccctgaacccgtcaccgtcagctggaatagcggcgccctgacatccggcgtccacacattccccgctgtcctgcagagcagcggcctgtacagcctgagctccgtggtcaccgtgcctagcagcagcctgggaacaaagacctacacctgcaacgtggaccataagccctccaacaccaaggtggacaagcgggtggaatccaagtatggacccccctgtcctccttgccctgctcctgaatttctcggaggcccctccgtcttcctgtttccccccaagcccaaggacaccctgatgatctcccggacacccgaagtcacctgcgtcgtggtggatgtcagccaggaagatcccgaggtgcagttcaactggtacgtggacggagtggaggtgcataacgccaaaaccaagcccagggaagagcagttcaacagcacctatcgggtcgtgtccgtgctcaccgtcctgcatcaggattggctcaacggcaaggagtacaagtgcaaggtgtccaacaagggcctgccctcctccatcgagaagaccatctccaaggctaagggccaacctcgggagccccaagtgtataccctccctcccagccaggaggagatgaccaagaatcaagtgagcctgacctgcctcgtgaagggattttacccctccgacatcgctgtggaatgggaaagcaatggccaacctgagaacaactacaagaccacaccccccgtgctggactccgatggctccttcttcctgtacagcaggctgaccgtggacaaatcccggtggcaagagggaaacgtgttcagctgctccgtgatgcacgaggctctccacaaccactacacccagaagagcctctccctgagcctcggctagtaa

SEQ ID NO: 709 - DNA, 1332 bp, synthetic construct
  misc_feature 1..1332: note = 19B5.2E6 heavy chain DNA sequence
  source 1..1332: mol_type = other DNA
cagatccaacttgttcagagcgggcctgaattgaagaaaccaggcgagactgtaaagatctcctgtaaggccagtggctatacattcaccacctacgcaatgagctgggtcaagcaggcacccggaaagggtctgaagtggatgggttggataaatacatactcaggcgtcccaacctacgctgatgatttgaaggggcgctttgccttttctcttgaaacctcagcatcaaccgcctacttgcagataaataacctcaaaaatgaagacaccgctacctatttctgcgcaagggggccttatgctatggactactggggccagggcacctctgtgactgtaagttctgctagcaccaagggccccagcgtgtttcctctcgctccctgcagccggagcacatccgagagcaccgctgctctgggctgtctcgtgaaggactacttccctgaacccgtcaccgtcagctggaatagcggcgccctgacatccggcgtccacacattccccgctgtcctgcagagcagcggcctgtacagcctgagctccgtggtcaccgtgcctagcagcagcctgggaacaaagacctacacctgcaacgtggaccataagccctccaacaccaaggtggacaagcgggtggaatccaagtatggacccccctgtcctccttgccctgctcctgaatttctcggaggcccctccgtcttcctgtttccccccaagcccaaggacaccctgatgatctcccggacacccgaagtcacctgcgtcgtggtggatgtcagccaggaagatcccgaggtgcagttcaactggtacgtggacggagtggaggtgcataacgccaaaaccaagcccagggaagagcagttcaacagcacctatcgggtcgtgtccgtgctcaccgtcctgcatcaggattggctcaacggcaaggagtacaagtgcaaggtgtccaacaagggcctgccctcctccatcgagaagaccatctccaaggctaagggccaacctcgggagccccaagtgtataccctccctcccagccaggaggagatgaccaagaatcaagtgagcctgacctgcctcgtgaagggattttacccctccgacatcgctgtggaatgggaaagcaatggccaacctgagaacaactacaagaccacaccccccgtgctggactccgatggctccttcttcctgtacagcaggctgaccgtggacaaatcccggtggcaagagggaaacgtgttcagctgctccgtgatgcacgaggctctccacaaccactacacccagaagagcctctccctgagcctcggctagtaa

SEQ ID NO: 710 - DNA, 1329 bp, synthetic construct
  misc_feature 1..1329: note = 20D11.2C6 heavy chain DNA sequence
  source 1..1329: mol_type = other DNA
gaggtccagctgcaacaatctggacctgaactggtgaagcctggggcttcagtgaagatatcctgtaaggcttctggatacacgttcactgacttctacataaactgggtgaagcagagccatggaaagagccttgagtggattggagatattaatcctaagaatggtggtattaactacaacccgaagttcaagatcaaggccacattgactgtagacaagtcctccagcacatcctacatggacctccgcggcctgacatctgaggactctgcagtctattactgcacctcaggctacggatttccttactggggccaagggactctggtcactgtctctgcagctagcaccaagggccccagcgtgtttcctctcgctccctgcagccggagcacatccgagagcaccgctgctctgggctgtctcgtgaaggactacttccctgaacccgtcaccgtcagctggaatagcggcgccctgacatccggcgtccacacattccccgctgtcctgcagagcagcggcctgtacagcctgagctccgtggtcaccgtgcctagcagcagcctgggaacaaagacctacacctgcaacgtggaccataagccctccaacaccaaggtggacaagcgggtggaatccaagtatggacccccctgtcctccttgccctgctcctgaatttctcggaggcccctccgtcttcctgtttccccccaagcccaaggacaccctgatgatctcccggacacccgaagtcacctgcgtcgtggtggatgtcagccaggaagatcccgaggtgcagttcaactggtacgtggacggagtggaggtgcataacgccaaaaccaagcccagggaagagcagttcaacagcacctatcgggtcgtgtccgtgctcaccgtcctgcatcaggattggctcaacggcaaggagtacaagtgcaaggtgtccaacaagggcctgccctcctccatcgagaagaccatctccaaggctaagggccaacctcgggagccccaagtgtataccctccctcccagccaggaggagatgaccaagaatcaagtgagcctgacctgcctcgtgaagggattttacccctccgacatcgctgtggaatgggaaagcaatggccaacctgagaacaactacaagaccacaccccccgtgctggactccgatggctccttcttcctgtacagcaggctgaccgtggacaaatcccggtggcaagagggaaacgtgttcagctgctccgtgatgcacgaggctctccacaaccactacacccagaagagcctctccctgagcctcggctagtaa

SEQ ID NO: 711 - DNA, 1344 bp, synthetic construct
  misc_feature 1..1344: note = 20H5.A3 heavy chain DNA sequence
  source 1..1344: mol_type = other DNA
cagatccagttggtacagtctggacctgagctgaagaagcctggagagtcagtcaagatctcctgcaaggcttctggttatgccttcacaacctatggaatgagctgggtgcaacaggctccaggaaagggtttaaagtggatgggctgggtaaacacctactctggagtgccaacatgtgctgatgacttcaagggacggtttgccttctctttggaaacctctgccagcactgcctatttgcagatcaacaacctcagaaatgaggacacggctacatatttctgtgcaagagggccctatgctatggactactggggtcaaggaacctcagtcaccgtctcctcagctaagactactcctcccagtgtctaccccctggcccccgtgtgcggcgacacaacaggctcctccgtgacactgggctgcctggtgaaaggctacttccccgagcccgtgacactgacatggaactccggctccctgtcctccggcgtgcacacattccccgccgtgctgcagtccgacctgtacacactgtcctcctccgtgacagtgacatcctccacatggccctcccagtccatcacatgcaacgtggcccaccccgcctcctccacaaaagtggacaaaaaaatcgagcccaggggccccacaatcaaaccctgccccccctgcaaatgccccgcccccaacgccgccggcggcccctccgtgttcatcttcccccccaaaatcaaagacgtgctgatgatctccctgtcccccatcgtgacatgcgtggtggtggacgtgtccgaggacgaccccgacgtgcagatctcctggttcgtgaacaacgtggaggtgcacacagcccagacacagacacacagggaggactacaactccacactgagggtggtgtccgccctgcccatccagcaccaggactggatgtccggcaaagagttcaaatgcaaagtgaacaacaaagacctgggcgcccccatcgagaggacaatctccaaacccaaaggctccgtgagggccccccaggtgtacgtgctgcccccccccgaggaggagatgacaaaaaaacaggtgacactgacatgcatggtgacagacttcatgcccgaggacatctacgtggagtggacaaacaacggcaaaacagagctgaactacaaaaacacagagcccgtgctggactccgacggctcctacttcatgtactccaaactgagggtggagaaaaaaaactgggtggagaggaactcctactcctgctccgtggtgcacgagggcctgcacaaccaccacacaacaaaatccttctccaggacacccggcaaatagtaa

SEQ ID NO: 712 - DNA, 1332 bp, synthetic construct
  misc_feature 1..1332: note = 23H9.2E4 heavy chain DNA sequence
  source 1..1332: mol_type = other DNA
cagatccagttggtacagtctggacctgagctgaagaagcctggagagacagtcaagatctcctgcaaggcttctgggtataccttcacaacctatgcaatgagctgggtgaaacaggctccaggaaagggtttaaagtggatgggctggataaacacctactctggagtgccaacatatgctgatgacctcaagggacggtttgccttctctttggaaacctctgccagcactgcctatttgcagatcaacaacctcaaaaatgaggacacggctacatatttctgtgcaagagggccctatgctatggactactggggtcaaggaacctcagtcaccgtctcctcagctagcaccaagggccccagcgtgtttcctctcgctccctgcagccggagcacatccgagagcaccgctgctctgggctgtctcgtgaaggactacttccctgaacccgtcaccgtcagctggaatagcggcgccctgacatccggcgtccacacattccccgctgtcctgcagagcagcggcctgtacagcctgagctccgtggtcaccgtgcctagcagcagcctgggaacaaagacctacacctgcaacgtggaccataagccctccaacaccaaggtggacaagcgggtggaatccaagtatggacccccctgtcctccttgccctgctcctgaatttctcggaggcccctccgtcttcctgtttccccccaagcccaaggacaccctgatgatctcccggacacccgaagtcacctgcgtcgtggtggatgtcagccaggaagatcccgaggtgcagttcaactggtacgtggacggagtggaggtgcataacgccaaaaccaagcccagggaagagcagttcaacagcacctatcgggtcgtgtccgtgctcaccgtcctgcatcaggattggctcaacggcaaggagtacaagtgcaaggtgtccaacaagggcctgccctcctccatcgagaagaccatctccaaggctaagggccaacctcgggagccccaagtgtataccctccctcccagccaggaggagatgaccaagaatcaagtgagcctgacctgcctcgtgaagggattttacccctccgacatcgctgtggaatgggaaagcaatggccaacctgagaacaactacaagaccacaccccccgtgctggactccgatggctccttcttcctgtacagcaggctgaccgtggacaaatcccggtggcaagagggaaacgtgttcagctgctccgtgatgcacgaggctctccacaaccactacacccagaagagcctctccctgagcctcggctagtaa

SEQ ID NO: 713 - DNA, 1344 bp, synthetic construct
  misc_feature 1..1344: note = 2D10-VH0-VL0 heavy chain DNA sequence
  source 1..1344: mol_type = other DNA
cagtttcagcttcaacagtctggtcctgaactcgtaaagcctggggccagtgtaaaaatatcctgtaaggcatcaggatacactttcaccgattactacatcaactgggtaaagcagcgacctggtcagggactggagtggattggctggatctaccccggatcaaatgacaccaaatacaatgagaagttcaagggcaaagctacccttacagtcgatacctcctcctccaccgcatatatgcaacttgggtcactgacttcagaggattctgcagtctatttttgcgctaattactttggatgcagcggctggtttttcgacgtgtggggaaccggaaccacagtgacagtatcctctgctagcaccaagggccccagcgtgtttcctctcgctccctgcagccggagcacatccgagagcaccgctgctctgggctgtctcgtgaaggactacttccctgaacccgtcaccgtcagctggaatagcggcgccctgacatccggcgtccacacattccccgctgtcctgcagagcagcggcctgtacagcctgagctccgtggtcaccgtgcctagcagcagcctgggaacaaagacctacacctgcaacgtggaccataagccctccaacaccaaggtggacaagcgggtggaatccaagtatggacccccctgtcctccttgccctgctcctgaatttctcggaggcccctccgtcttcctgtttccccccaagcccaaggacaccctgatgatctcccggacacccgaagtcacctgcgtcgtggtggatgtcagccaggaagatcccgaggtgcagttcaactggtacgtggacggagtggaggtgcataacgccaaaaccaagcccagggaagagcagttcaacagcacctatcgggtcgtgtccgtgctcaccgtcctgcatcaggattggctcaacggcaaggagtacaagtgcaaggtgtccaacaagggcctgccctcctccatcgagaagaccatctccaaggctaagggccaacctcgggagccccaagtgtataccctccctcccagccaggaggagatgaccaagaatcaagtgagcctgacctgcctcgtgaagggattttacccctccgacatcgctgtggaatgggaaagcaatggccaacctgagaacaactacaagaccacaccccccgtgctggactccgatggctccttcttcctgtacagcaggctgaccgtggacaaatcccggtggcaagagggaaacgtgttcagctgctccgtgatgcacgaggctctccacaaccactacacccagaagagcctctccctgagcctcggctagtaa

SEQ ID NO: 714 - DNA, 1341 bp, synthetic construct
  misc_feature 1..1341: note = 3B11.2G2 heavy chain DNA sequence
  source 1..1341: mol_type = other DNA
cagatccagttggtacagtctggacctgagctgaagaagcctggagagacagtcaagatctcctgcaagacttctgggtataaattcaaaacctatgtaatgagctgggtgaaacaggctccaggaaaggctttaaagtggatgggctggataaacacctactctggagtgccaacatatgctgatgacttcaagggacggtttgccttctctttggaaacctctgccagcactgcctatttggagatcatcaacctcaaaaatgaggacacggctacatatttctgtgcaagagatggtaattacggggatcctatggactactggggtcaaggaacctcagtcaccgtctcctcagctagcaccaagggccccagcgtgtttcctctcgctccctgcagccggagcacatccgagagcaccgctgctctgggctgtctcgtgaaggactacttccctgaacccgtcaccgtcagctggaatagcggcgccctgacatccggcgtccacacattccccgctgtcctgcagagcagcggcctgtacagcctgagctccgtggtcaccgtgcctagcagcagcctgggaacaaagacctacacctgcaacgtggaccataagccctccaacaccaaggtggacaagcgggtggaatccaagtatggacccccctgtcctccttgccctgctcctgaatttctcggaggcccctccgtcttcctgtttccccccaagcccaaggacaccctgatgatctcccggacacccgaagtcacctgcgtcgtggtggatgtcagccaggaagatcccgaggtgcagttcaactggtacgtggacggagtggaggtgcataacgccaaaaccaagcccagggaagagcagttcaacagcacctatcgggtcgtgtccgtgctcaccgtcctgcatcaggattggctcaacggcaaggagtacaagtgcaaggtgtccaacaagggcctgccctcctccatcgagaagaccatctccaaggctaagggccaacctcgggagccccaagtgtataccctccctcccagccaggaggagatgaccaagaatcaagtgagcctgacctgcctcgtgaagggattttacccctccgacatcgctgtggaatgggaaagcaatggccaacctgagaacaactacaagaccacaccccccgtgctggactccgatggctccttcttcctgtacagcaggctgaccgtggacaaatcccggtggcaagagggaaacgtgttcagctgctccgtgatgcacgaggctctccacaaccactacacccagaagagcctctccctgagcctcggctagtaa

SEQ ID NO: 715 - DNA, 1323 bp, synthetic construct
  misc_feature 1..1323: note = 7D8.2D8 heavy chain DNA sequence
  source 1..1323: mol_type = other DNA
gaagtgcagctggtggagtctgggggaggcttagtgaagcctggagggtccctgaaactctcctgtgcagcctctggattcactttcagtagctatgccatgtcttgggttcgccagactccggaaaagaggctggagtgggtcgcaaccatcagtgatggtggtatttacacctactatccagacaatgtaaagggccgattcaccatttccagagacaatgccaagaacaacctgttcctgcaaatgagccatctgaagtctgaggatacagccatgtattactgtgtaagagatgggggctactggggccaaggcaccactctcacagtctcctcagctagcaccaagggccccagcgtgtttcctctcgctccctgcagccggagcacatccgagagcaccgctgctctgggctgtctcgtgaaggactacttccctgaacccgtcaccgtcagctggaatagcggcgccctgacatccggcgtccacacattccccgctgtcctgcagagcagcggcctgtacagcctgagctccgtggtcaccgtgcctagcagcagcctgggaacaaagacctacacctgcaacgtggaccataagccctccaacaccaaggtggacaagcgggtggaatccaagtatggacccccctgtcctccttgccctgctcctgaatttctcggaggcccctccgtcttcctgtttccccccaagcccaaggacaccctgatgatctcccggacacccgaagtcacctgcgtcgtggtggatgtcagccaggaagatcccgaggtgcagttcaactggtacgtggacggagtggaggtgcataacgccaaaaccaagcccagggaagagcagttcaacagcacctatcgggtcgtgtccgtgctcaccgtcctgcatcaggattggctcaacggcaaggagtacaagtgcaaggtgtccaacaagggcctgccctcctccatcgagaagaccatctccaaggctaagggccaacctcgggagccccaagtgtataccctccctcccagccaggaggagatgaccaagaatcaagtgagcctgacctgcctcgtgaagggattttacccctccgacatcgctgtggaatgggaaagcaatggccaacctgagaacaactacaagaccacaccccccgtgctggactccgatggctccttcttcctgtacagcaggctgaccgtggacaaatcccggtggcaagagggaaacgtgttcagctgctccgtgatgcacgaggctctccacaaccactacacccagaagagcctctccctgagcctcggctagtaa

SEQ ID NO: 716 - DNA, 1344 bp, synthetic construct
  misc_feature 1..1344: note = mIMT001 heavy chain DNA sequence
  source 1..1344: mol_type = other DNA
cagatccaacttgtgcagtcaggtccagaattgaagaagcctggtgagaccgtcaagatttcctgtaaggcctctggttatacttttaccaactatggcatgaattgggtcaagcaggcacctgggaagggtttgaaatggatggggtggataaataccaacacaggggaaccaacttacgttgaagagtttaagggtcgttttgcattcagtcttgagacttctgcaagcacagcttacctccaaattaacaatctcaaaaatgaagatactgctacatatttctgtgctccttatgataattttttcgcctactggggacagggaactctggtcaccgtctcagcagctaagactactcctcccagtgtctaccccctggcccccgtgtgcggcgacacaacaggctcctccgtgacactgggctgcctggtgaaaggctacttccccgagcccgtgacactgacatggaactccggctccctgtcctccggcgtgcacacattccccgccgtgctgcagtccgacctgtacacactgtcctcctccgtgacagtgacatcctccacatggccctcccagtccatcacatgcaacgtggcccaccccgcctcctccacaaaagtggacaaaaaaatcgagcccaggggccccacaatcaaaccctgccccccctgcaaatgccccgcccccaacgccgccggcggcccctccgtgttcatcttcccccccaaaatcaaagacgtgctgatgatctccctgtcccccatcgtgacatgcgtggtggtggacgtgtccgaggacgaccccgacgtgcagatctcctggttcgtgaacaacgtggaggtgcacacagcccagacacagacacacagggaggactacaactccacactgagggtggtgtccgccctgcccatccagcaccaggactggatgtccggcaaagagttcaaatgcaaagtgaacaacaaagacctgggcgcccccatcgagaggacaatctccaaacccaaaggctccgtgagggccccccaggtgtacgtgctgcccccccccgaggaggagatgacaaaaaaacaggtgacactgacatgcatggtgacagacttcatgcccgaggacatctacgtggagtggacaaacaacggcaaaacagagctgaactacaaaaacacagagcccgtgctggactccgacggctcctacttcatgtactccaaactgagggtggagaaaaaaaactgggtggagaggaactcctactcctgctccgtggtgcacgagggcctgcacaaccaccacacaacaaaatccttctccaggacacccggcaaatagtaa

SEQ ID NO: 717 - DNA, 1332 bp, synthetic construct
  misc_feature 1..1332: note = 4A11.2B5 heavy chain DNA sequence
  source 1..1332: mol_type = other DNA
caggtacaacttcagcagagcggtccagaacttgtgaagcccggtgctagtgtcaaaatatcttgcaaagcaagtggttattccttcaccaactattacatacactgggtaaaacaacgtccagggcaaggactcgaatggattggttggatctaccccggcagcggcaacactaactacaacgagaagtttaaaggcaaagctactctcacagcagacacttctagcagtacaacaaatatgcagttgtcctctctgacttccgaagacagcgccgtctattactgttctactgcacccggaggttttgacgtctggggttccggcaccacagttaccgttagttccgctagcaccaagggccccagcgtgtttcctctcgctccctgcagccggagcacatccgagagcaccgctgctctgggctgtctcgtgaaggactacttccctgaacccgtcaccgtcagctggaatagcggcgccctgacatccggcgtccacacattccccgctgtcctgcagagcagcggcctgtacagcctgagctccgtggtcaccgtgcctagcagcagcctgggaacaaagacctacacctgcaacgtggaccataagccctccaacaccaaggtggacaagcgggtggaatccaagtatggacccccctgtcctccttgccctgctcctgaatttctcggaggcccctccgtcttcctgtttccccccaagcccaaggacaccctgatgatctcccggacacccgaagtcacctgcgtcgtggtggatgtcagccaggaagatcccgaggtgcagttcaactggtacgtggacggagtggaggtgcataacgccaaaaccaagcccagggaagagcagttcaacagcacctatcgggtcgtgtccgtgctcaccgtcctgcatcaggattggctcaacggcaaggagtacaagtgcaaggtgtccaacaagggcctgccctcctccatcgagaagaccatctccaaggctaagggccaacctcgggagccccaagtgtataccctccctcccagccaggaggagatgaccaagaatcaagtgagcctgacctgcctcgtgaagggattttacccctccgacatcgctgtggaatgggaaagcaatggccaacctgagaacaactacaagaccacaccccccgtgctggactccgatggctccttcttcctgtacagcaggctgaccgtggacaaatcccggtggcaagagggaaacgtgttcagctgctccgtgatgcacgaggctctccacaaccactacacccagaagagcctctccctgagcctcggctagtaa

SEQ ID NO: 718 - DNA, 1332 bp, synthetic construct
  misc_feature 1..1332: note = 4A11.H1L1 heavy chain DNA sequence
  source 1..1332: mol_type = other DNA
caggtgcagctggtgcaatcaggagccgaagttaagaagcctggcgccagcgtcaaggtctcatgtaaagcctccggttacagtttcaccaactactatatgcactgggttaggcaagcaccaggccaggggcttgagtggatgggatggatctatccagggagcggtaacaccaattacaatgagaagtttcaagggcgcgtaaccatgacagcagataccagtataagcaccgcctatatggaactctctcggttgagatccgatgataccgctgtttattactgctctaccgcacctggtggtttcgacgtttggggccaaggtactacagtgaccgtatcatcagctagcaccaagggccccagcgtgtttcctctcgctccctgcagccggagcacatccgagagcaccgctgctctgggctgtctcgtgaaggactacttccctgaacccgtcaccgtcagctggaatagcggcgccctgacatccggcgtccacacattccccgctgtcctgcagagcagcggcctgtacagcctgagctccgtggtcaccgtgcctagcagcagcctgggaacaaagacctacacctgcaacgtggaccataagccctccaacaccaaggtggacaagcgggtggaatccaagtatggacccccctgtcctccttgccctgctcctgaatttctcggaggcccctccgtcttcctgtttccccccaagcccaaggacaccctgatgatctcccggacacccgaagtcacctgcgtcgtggtggatgtcagccaggaagatcccgaggtgcagttcaactggtacgtggacggagtggaggtgcataacgccaaaaccaagcccagggaagagcagttcaacagcacctatcgggtcgtgtccgtgctcaccgtcctgcatcaggattggctcaacggcaaggagtacaagtgcaaggtgtccaacaagggcctgccctcctccatcgagaagaccatctccaaggctaagggccaacctcgggagccccaagtgtataccctccctcccagccaggaggagatgaccaagaatcaagtgagcctgacctgcctcgtgaagggattttacccctccgacatcgctgtggaatgggaaagcaatggccaacctgagaacaactacaagaccacaccccccgtgctggactccgatggctccttcttcctgtacagcaggctgaccgtggacaaatcccggtggcaagagggaaacgtgttcagctgctccgtgatgcacgaggctctccacaaccactacacccagaagagcctctccctgagcctcggctagtaa

SEQ ID NO: 719 - DNA, 1332 bp, synthetic construct
  misc_feature 1..1332: note = 4A11.H4L2 heavy chain DNA sequence
  source 1..1332: mol_type = other DNA
caggtgcaactggtccagtctggggccgaggtcaaaaagcctggagcctccgtcaaagtgtcatgtaaagcctcagggtatagtttcaccaactactatatacattgggtcagacaagccccaggccagcgtcttgagtggatgggatggatttatcccggatcagggaatacaaactataacgagaaatttcaaggcagagttactctcactgccgatacctctgcaagtactacctatatggagctctccagtctcagaagcgaagacacagcagtatattactgtagcaccgccccaggcgggtttgacgtgtggggccaaggcactactgtaaccgttagctcagctagcaccaagggccccagcgtgtttcctctcgctccctgcagccggagcacatccgagagcaccgctgctctgggctgtctcgtgaaggactacttccctgaacccgtcaccgtcagctggaatagcggcgccctgacatccggcgtccacacattccccgctgtcctgcagagcagcggcctgtacagcctgagctccgtggtcaccgtgcctagcagcagcctgggaacaaagacctacacctgcaacgtggaccataagccctccaacaccaaggtggacaagcgggtggaatccaagtatggacccccctgtcctccttgccctgctcctgaatttctcggaggcccctccgtcttcctgtttccccccaagcccaaggacaccctgatgatctcccggacacccgaagtcacctgcgtcgtggtggatgtcagccaggaagatcccgaggtgcagttcaactggtacgtggacggagtggaggtgcataacgccaaaaccaagcccagggaagagcagttcaacagcacctatcgggtcgtgtccgtgctcaccgtcctgcatcaggattggctcaacggcaaggagtacaagtgcaaggtgtccaacaagggcctgccctcctccatcgagaagaccatctccaaggctaagggccaacctcgggagccccaagtgtataccctccctcccagccaggaggagatgaccaagaatcaagtgagcctgacctgcctcgtgaagggattttacccctccgacatcgctgtggaatgggaaagcaatggccaacctgagaacaactacaagaccacaccccccgtgctggactccgatggctccttcttcctgtacagcaggctgaccgtggacaaatcccggtggcaagagggaaacgtgttcagctgctccgtgatgcacgaggctctccacaaccactacacccagaagagcctctccctgagcctcggctagtaa

SEQ ID NO: 720 - DNA, 1341 bp, synthetic construct
  misc_feature 1..1341: note = 4G2.2G6 heavy chain DNA sequence
  source 1..1341: mol_type = other DNA
caaatacagctcgtgcagtctggtcccgatttgaagaagcctggagaaaccgtaaagataagctgtaaggctagtggttacactttcacaacatacgttatgtcatgggttaaacaggctcctggaaaagaccttaaatggatgggatggattaacacccatagcggtgtcccaacttacgctgacgattttaagggacgatttgacttttctctcgaaacttctgccaacacagcttttttgcagatcaacaatctcaagaatgaagacaccgcaacctatttctgcactcgagatgggaacgacggggatgcaatggataactggggacaaggcacatcagttaccgtgagctctgctagcaccaagggccccagcgtgtttcctctcgctccctgcagccggagcacatccgagagcaccgctgctctgggctgtctcgtgaaggactacttccctgaacccgtcaccgtcagctggaatagcggcgccctgacatccggcgtccacacattccccgctgtcctgcagagcagcggcctgtacagcctgagctccgtggtcaccgtgcctagcagcagcctgggaacaaagacctacacctgcaacgtggaccataagccctccaacaccaaggtggacaagcgggtggaatccaagtatggacccccctgtcctccttgccctgctcctgaatttctcggaggcccctccgtcttcctgtttccccccaagcccaaggacaccctgatgatctcccggacacccgaagtcacctgcgtcgtggtggatgtcagccaggaagatcccgaggtgcagttcaactggtacgtggacggagtggaggtgcataacgccaaaaccaagcccagggaagagcagttcaacagcacctatcgggtcgtgtccgtgctcaccgtcctgcatcaggattggctcaacggcaaggagtacaagtgcaaggtgtccaacaagggcctgccctcctccatcgagaagaccatctccaaggctaagggccaacctcgggagccccaagtgtataccctccctcccagccaggaggagatgaccaagaatcaagtgagcctgacctgcctcgtgaagggattttacccctccgacatcgctgtggaatgggaaagcaatggccaacctgagaacaactacaagaccacaccccccgtgctggactccgatggctccttcttcctgtacagcaggctgaccgtggacaaatcccggtggcaagagggaaacgtgttcagctgctccgtgatgcacgaggctctccacaaccactacacccagaagagcctctccctgagcctcggctagtaa

SEQ ID NO: 721 - DNA, 1344 bp, synthetic construct
  misc_feature 1..1344: note = 6B3.2D3 heavy chain DNA sequence
  source 1..1344: mol_type = other DNA
caggtgcagctgaagcagtcaggacctggcctagtgcagccctcacagagcctgtccatcacctgcacagtctctggtttctcattaactagttatggtgtacactgggttcgccagcctccaggaaagggtctggagtggctgggagtgatatggagtggtggaagcacagactataatgctgctttcatatccagactgagcatcagtaaggacaactccaagagccaagttttctttaaaatgaacagtctgcaagctgatgacactgccatatactactgtgccaaagggccttatgattacgacttaggctggtttgcttactggggccaagggactctggtcactgtctctgcagctagcaccaagggccccagcgtgtttcctctcgctccctgcagccggagcacatccgagagcaccgctgctctgggctgtctcgtgaaggactacttccctgaacccgtcaccgtcagctggaatagcggcgccctgacatccggcgtccacacattccccgctgtcctgcagagcagcggcctgtacagcctgagctccgtggtcaccgtgcctagcagcagcctgggaacaaagacctacacctgcaacgtggaccataagccctccaacaccaaggtggacaagcgggtggaatccaagtatggacccccctgtcctccttgccctgctcctgaatttctcggaggcccctccgtcttcctgtttccccccaagcccaaggacaccctgatgatctcccggacacccgaagtcacctgcgtcgtggtggatgtcagccaggaagatcccgaggtgcagttcaactggtacgtggacggagtggaggtgcataacgccaaaaccaagcccagggaagagcagttcaacagcacctatcgggtcgtgtccgtgctcaccgtcctgcatcaggattggctcaacggcaaggagtacaagtgcaaggtgtccaacaagggcctgccctcctccatcgagaagaccatctccaaggctaagggccaacctcgggagccccaagtgtataccctccctcccagccaggaggagatgaccaagaatcaagtgagcctgacctgcctcgtgaagggattttacccctccgacatcgctgtggaatgggaaagcaatggccaacctgagaacaactacaagaccacaccccccgtgctggactccgatggctccttcttcctgtacagcaggctgaccgtggacaaatcccggtggcaagagggaaacgtgttcagctgctccgtgatgcacgaggctctccacaaccactacacccagaagagcctctccctgagcctcggctagtaa

SEQ ID NO: 722 - DNA, 1332 bp, synthetic construct
  misc_feature 1..1332: note = 6H6.2D6 heavy chain DNA sequence
  source 1..1332: mol_type = other DNA
cagatccagctggtgcagtccggccccgagctgaagaagcccggcgagactgtgaagatctcctgcaaggcctccggctacaccttcaccacctacggcatgtcctgggtgaagcaggcccccggcaagggcctgaagtggatggcctggatcaacacctactccggcgtgcccacctacgccgacgacttcaagggcaggttcgccttctccctggagacttccgcctccaccgcctacctgcagatcaacaacctgaccaacgaggacaccgccacctacttctgcgccaggggcccctacgccatggactactggggccagggcacctccgtgaccgtgtcctccgctagcaccaagggccccagcgtgtttcctctcgctccctgcagccggagcacatccgagagcaccgctgctctgggctgtctcgtgaaggactacttccctgaacccgtcaccgtcagctggaatagcggcgccctgacatccggcgtccacacattccccgctgtcctgcagagcagcggcctgtacagcctgagctccgtggtcaccgtgcctagcagcagcctgggaacaaagacctacacctgcaacgtggaccataagccctccaacaccaaggtggacaagcgggtggaatccaagtatggacccccctgtcctccttgccctgctcctgaatttctcggaggcccctccgtcttcctgtttccccccaagcccaaggacaccctgatgatctcccggacacccgaagtcacctgcgtcgtggtggatgtcagccaggaagatcccgaggtgcagttcaactggtacgtggacggagtggaggtgcataacgccaaaaccaagcccagggaagagcagttcaacagcacctatcgggtcgtgtccgtgctcaccgtcctgcatcaggattggctcaacggcaaggagtacaagtgcaaggtgtccaacaagggcctgccctcctccatcgagaagaccatctccaaggctaagggccaacctcgggagccccaagtgtataccctccctcccagccaggaggagatgaccaagaatcaagtgagcctgacctgcctcgtgaagggattttacccctccgacatcgctgtggaatgggaaagcaatggccaacctgagaacaactacaagaccacaccccccgtgctggactccgatggctccttcttcctgtacagcaggctgaccgtggacaaatcccggtggcaagagggaaacgtgttcagctgctccgtgatgcacgaggctctccacaaccactacacccagaagagcctctccctgagcctcggctagtaa

SEQ ID NO: 723 - DNA, 1329 bp, synthetic construct
  misc_feature 1..1329: note = 9H2.2H10 heavy chain DNA sequence
  source 1..1329: mol_type = other DNA
caggtccagctgcagcagcctggggctgaactggtggggcctgggtcttcagtgaagctgtcctgcaaggcttctggctacaccttcaccaactactggatacattgggtgaagcagaggcctctacaaggccttgaatggattggtaacattgacccttctgatagtgaaactcactacaatcaaaagttcaaggacaaggccacattgactgtagacaaatcctccagcacagcctacatgcaactcagcagcctgacatctgaggactctgcggtctattactgtgcaagacatggttactacgactactggggccaaggcaccactctcacagtctcctcagctagcaccaagggccccagcgtgtttcctctcgctccctgcagccggagcacatccgagagcaccgctgctctgggctgtctcgtgaaggactacttccctgaacccgtcaccgtcagctggaatagcggcgccctgacatccggcgtccacacattccccgctgtcctgcagagcagcggcctgtacagcctgagctccgtggtcaccgtgcctagcagcagcctgggaacaaagacctacacctgcaacgtggaccataagccctccaacaccaaggtggacaagcgggtggaatccaagtatggacccccctgtcctccttgccctgctcctgaatttctcggaggcccctccgtcttcctgtttccccccaagcccaaggacaccctgatgatctcccggacacccgaagtcacctgcgtcgtggtggatgtcagccaggaagatcccgaggtgcagttcaactggtacgtggacggagtggaggtgcataacgccaaaaccaagcccagggaagagcagttcaacagcacctatcgggtcgtgtccgtgctcaccgtcctgcatcaggattggctcaacggcaaggagtacaagtgcaaggtgtccaacaagggcctgccctcctccatcgagaagaccatctccaaggctaagggccaacctcgggagccccaagtgtataccctccctcccagccaggaggagatgaccaagaatcaagtgagcctgacctgcctcgtgaagggattttacccctccgacatcgctgtggaatgggaaagcaatggccaacctgagaacaactacaagaccacaccccccgtgctggactccgatggctccttcttcctgtacagcaggctgaccgtggacaaatcccggtggcaagagggaaacgtgttcagctgctccgtgatgcacgaggctctccacaaccactacacccagaagagcctctccctgagcctcggctagtaa

SEQ ID NO: 724 - DNA, 1341 bp, synthetic construct
  misc_feature 1..1341: note = 13G4.2F8 heavy chain DNA sequence
  source 1..1341: mol_type = other DNA
caggtccagctgcagcagcctggggctgagctggtaaagcctggggcttcagtgaagttgtcctgcaaggcttctggctacactttcaccagctactggatgcactgggtgaagcagaggcctggacaaggccttgagtggattggaatgattcatcctaacagtggtagtactgactacaatgagaagttcaagaacaaggccacactgaatgtagacaaatcctccagtacagcctacatacaactcagcagcctgacatctgaggactctgcggtctattactgtacaagatgggggatttattactacgcgagggactactggggccaaggcaccactctcacagtctcctcagctagcaccaagggccccagcgtgtttcctctcgctccctgcagccggagcacatccgagagcaccgctgctctgggctgtctcgtgaaggactacttccctgaacccgtcaccgtcagctggaatagcggcgccctgacatccggcgtccacacattccccgctgtcctgcagagcagcggcctgtacagcctgagctccgtggtcaccgtgcctagcagcagcctgggaacaaagacctacacctgcaacgtggaccataagccctccaacaccaaggtggacaagcgggtggaatccaagtatggacccccctgtcctccttgccctgctcctgaatttctcggaggcccctccgtcttcctgtttccccccaagcccaaggacaccctgatgatctcccggacacccgaagtcacctgcgtcgtggtggatgtcagccaggaagatcccgaggtgcagttcaactggtacgtggacggagtggaggtgcataacgccaaaaccaagcccagggaagagcagttcaacagcacctatcgggtcgtgtccgtgctcaccgtcctgcatcaggattggctcaacggcaaggagtacaagtgcaaggtgtccaacaagggcctgccctcctccatcgagaagaccatctccaaggctaagggccaacctcgggagccccaagtgtataccctccctcccagccaggaggagatgaccaagaatcaagtgagcctgacctgcctcgtgaagggattttacccctccgacatcgctgtggaatgggaaagcaatggccaacctgagaacaactacaagaccacaccccccgtgctggactccgatggctccttcttcctgtacagcaggctgaccgtggacaaatcccggtggcaagagggaaacgtgttcagctgctccgtgatgcacgaggctctccacaaccactacacccagaagagcctctccctgagcctcggctagtaa

SEQ ID NO: 725 - DNA, 1335 bp, synthetic construct
  misc_feature 1..1335: note = 13H12.2F8 heavy chain DNA sequence
  source 1..1335: mol_type = other DNA
cagatccagctggtccaatcaggacccgaactgaaaaaaccaggcgagacagtcaaaatcagctgtaaggcctcaggctacactttcacaacctacgggatgtcatgggtaaagcaagctcctggcaaggggctgaaatggatgggttggatcaacacatactctggagtgcccacctacgctgacgactttaagggtagattcgcatttagcctggaaacaagtgccagtacagcctacctccagataaacaacttgaaaaacgaggataccgcaacctatttttgcgccgtcccctacgagtacgacggtgcctattggggtcagggtacactcgtaacagtttccgccgctagcaccaagggccccagcgtgtttcctctcgctccctgcagccggagcacatccgagagcaccgctgctctgggctgtctcgtgaaggactacttccctgaacccgtcaccgtcagctggaatagcggcgccctgacatccggcgtccacacattccccgctgtcctgcagagcagcggcctgtacagcctgagctccgtggtcaccgtgcctagcagcagcctgggaacaaagacctacacctgcaacgtggaccataagccctccaacaccaaggtggacaagcgggtggaatccaagtatggacccccctgtcctccttgccctgctcctgaatttctcggaggcccctccgtcttcctgtttccccccaagcccaaggacaccctgatgatctcccggacacccgaagtcacctgcgtcgtggtggatgtcagccaggaagatcccgaggtgcagttcaactggtacgtggacggagtggaggtgcataacgccaaaaccaagcccagggaagagcagttcaacagcacctatcgggtcgtgtccgtgctcaccgtcctgcatcaggattggctcaacggcaaggagtacaagtgcaaggtgtccaacaagggcctgccctcctccatcgagaagaccatctccaaggctaagggccaacctcgggagccccaagtgtataccctccctcccagccaggaggagatgaccaagaatcaagtgagcctgacctgcctcgtgaagggattttacccctccgacatcgctgtggaatgggaaagcaatggccaacctgagaacaactacaagaccacaccccccgtgctggactccgatggctccttcttcctgtacagcaggctgaccgtggacaaatcccggtggcaagagggaaacgtgttcagctgctccgtgatgcacgaggctctccacaaccactacacccagaagagcctctccctgagcctcggctagtaa

SEQ ID NO: 726 - DNA, 1329 bp, synthetic construct
  misc_feature 1..1329: note = 15G7.2A7 heavy chain DNA sequence
  source 1..1329: mol_type = other DNA
gaggtccagctgcaacaatctggacctgagctggtgaagcctggggcttcagtgaagatatcctgtaaggcttctggatacacgttcactgactactacatgaactgggtgaagcagagccatggaaagagccttgagtggattggagatattaatcctaacaatggtggtactaactacaaccagaagttcaagggcaaggccacattgactgtagacaagtcctccagcacagcctacatggagctccgcagcctgacatctgaggactctgcagtctattactgcacctcaggctacgggtttccttactggggccaggggactctggtcactgtctctgcagctagcaccaagggccccagcgtgtttcctctcgctccctgcagccggagcacatccgagagcaccgctgctctgggctgtctcgtgaaggactacttccctgaacccgtcaccgtcagctggaatagcggcgccctgacatccggcgtccacacattccccgctgtcctgcagagcagcggcctgtacagcctgagctccgtggtcaccgtgcctagcagcagcctgggaacaaagacctacacctgcaacgtggaccataagccctccaacaccaaggtggacaagcgggtggaatccaagtatggacccccctgtcctccttgccctgctcctgaatttctcggaggcccctccgtcttcctgtttccccccaagcccaaggacaccctgatgatctcccggacacccgaagtcacctgcgtcgtggtggatgtcagccaggaagatcccgaggtgcagttcaactggtacgtggacggagtggaggtgcataacgccaaaaccaagcccagggaagagcagttcaacagcacctatcgggtcgtgtccgtgctcaccgtcctgcatcaggattggctcaacggcaaggagtacaagtgcaaggtgtccaacaagggcctgccctcctccatcgagaagaccatctccaaggctaagggccaacctcgggagccccaagtgtataccctccctcccagccaggaggagatgaccaagaatcaagtgagcctgacctgcctcgtgaagggattttacccctccgacatcgctgtggaatgggaaagcaatggccaacctgagaacaactacaagaccacaccccccgtgctggactccgatggctccttcttcctgtacagcaggctgaccgtggacaaatcccggtggcaagagggaaacgtgttcagctgctccgtgatgcacgaggctctccacaaccactacacccagaagagcctctccctgagcctcggctagtaa

SEQ ID NO: 727 - DNA, 1335 bp, synthetic construct
  misc_feature 1..1335: note = 19D9.2E5 heavy chain DNA sequence
  source 1..1335: mol_type = other DNA
cagatccagttggtacagtctggacctgagctgaagaagcctggagagacagtcaagatctcctgcaaggcttctggatataccttcacaacctatggaatgggctgggtgaaacaggctccaggaaagggtttgaagtggatgggctggataaacacctactctggcgtgccaacatatgctgatgacttcaagggacggtttgccttctctttggaaacctctaccagcactgcctatttgcagatcaacaacctcaaaaatgaggacatggctacatatttctgtgcaaccccttatgaatacgacggggcttactggggccaagggactctggtcactgtctctgcagctagcaccaagggccccagcgtgtttcctctcgctccctgcagccggagcacatccgagagcaccgctgctctgggctgtctcgtgaaggactacttccctgaacccgtcaccgtcagctggaatagcggcgccctgacatccggcgtccacacattccccgctgtcctgcagagcagcggcctgtacagcctgagctccgtggtcaccgtgcctagcagcagcctgggaacaaagacctacacctgcaacgtggaccataagccctccaacaccaaggtggacaagcgggtggaatccaagtatggacccccctgtcctccttgccctgctcctgaatttctcggaggcccctccgtcttcctgtttccccccaagcccaaggacaccctgatgatctcccggacacccgaagtcacctgcgtcgtggtggatgtcagccaggaagatcccgaggtgcagttcaactggtacgtggacggagtggaggtgcataacgccaaaaccaagcccagggaagagcagttcaacagcacctatcgggtcgtgtccgtgctcaccgtcctgcatcaggattggctcaacggcaaggagtacaagtgcaaggtgtccaacaagggcctgccctcctccatcgagaagaccatctccaaggctaagggccaacctcgggagccccaagtgtataccctccctcccagccaggaggagatgaccaagaatcaagtgagcctgacctgcctcgtgaagggattttacccctccgacatcgctgtggaatgggaaagcaatggccaacctgagaacaactacaagaccacaccccccgtgctggactccgatggctccttcttcctgtacagcaggctgaccgtggacaaatcccggtggcaagagggaaacgtgttcagctgctccgtgatgcacgaggctctccacaaccactacacccagaagagcctctccctgagcctcggctagtaa

SEQ ID NO: 728 - DNA, 1320 bp, synthetic construct
  misc_feature 1..1320: note = 23B10.2B12 heavy chain DNA sequence
  source 1..1320: mol_type = other DNA
caggtccagctgcagcagtctggacctgaactggtgaagcctggggattctgtgaagatatcctgcaaggctgctggctacaccttcagtgactattatataaactgggtgaagcagaggcctggacagggacttgagtggattggatggatttatcctgtaagcgttaatactaagtacaatgagaagttcaagggcaaggccacattgactgtagacacatcctccagcacagcctacatgcagctcagcagcctgacctctgaggactctggggtctatttctgtgcctaccttgattattggggccaagggactctggtcactgtctctgcagctagcaccaagggccccagcgtgtttcctctcgctccctgcagccggagcacatccgagagcaccgctgctctgggctgtctcgtgaaggactacttccctgaacccgtcaccgtcagctggaatagcggcgccctgacatccggcgtccacacattccccgctgtcctgcagagcagcggcctgtacagcctgagctccgtggtcaccgtgcctagcagcagcctgggaacaaagacctacacctgcaacgtggaccataagccctccaacaccaaggtggacaagcgggtggaatccaagtatggacccccctgtcctccttgccctgctcctgaatttctcggaggcccctccgtcttcctgtttccccccaagcccaaggacaccctgatgatctcccggacacccgaagtcacctgcgtcgtggtggatgtcagccaggaagatcccgaggtgcagttcaactggtacgtggacggagtggaggtgcataacgccaaaaccaagcccagggaagagcagttcaacagcacctatcgggtcgtgtccgtgctcaccgtcctgcatcaggattggctcaacggcaaggagtacaagtgcaaggtgtccaacaagggcctgccctcctccatcgagaagaccatctccaaggctaagggccaacctcgggagccccaagtgtataccctccctcccagccaggaggagatgaccaagaatcaagtgagcctgacctgcctcgtgaagggattttacccctccgacatcgctgtggaatgggaaagcaatggccaacctgagaacaactacaagaccacaccccccgtgctggactccgatggctccttcttcctgtacagcaggctgaccgtggacaaatcccggtggcaagagggaaacgtgttcagctgctccgtgatgcacgaggctctccacaaccactacacccagaagagcctctccctgagcctcggctagtaa

SEQ ID NO: 729 - DNA, 1344 bp, synthetic construct
  misc_feature 1..1344: note = 24D12.2H9 heavy chain DNA sequence
  source 1..1344: mol_type = other DNA
caggtgcagctgaagcagtcaggacctggcctagtgcagccctcacagagcctgtccatcacctgcacagtctctggtttctcattaactagctatggtgtacactgggttcgccaggctccaggaaagggtctggaatggctgggagtgatatggagtggtggaagcacagactataatgctgctttcatgtccagactgagcatcagcaaggacaactccaagagccaagttttctttaaaatgaacagtctgcaagctgatgacactgccatatactactgtgccaaaagccctgatggttacgacgtcgcctggtttggttactggggccaagggactctggtcactgtctctgcagctagcaccaagggccccagcgtgtttcctctcgctccctgcagccggagcacatccgagagcaccgctgctctgggctgtctcgtgaaggactacttccctgaacccgtcaccgtcagctggaatagcggcgccctgacatccggcgtccacacattccccgctgtcctgcagagcagcggcctgtacagcctgagctccgtggtcaccgtgcctagcagcagcctgggaacaaagacctacacctgcaacgtggaccataagccctccaacaccaaggtggacaagcgggtggaatccaagtatggacccccctgtcctccttgccctgctcctgaatttctcggaggcccctccgtcttcctgtttccccccaagcccaaggacaccctgatgatctcccggacacccgaagtcacctgcgtcgtggtggatgtcagccaggaagatcccgaggtgcagttcaactggtacgtggacggagtggaggtgcataacgccaaaaccaagcccagggaagagcagttcaacagcacctatcgggtcgtgtccgtgctcaccgtcctgcatcaggattggctcaacggcaaggagtacaagtgcaaggtgtccaacaagggcctgccctcctccatcgagaagaccatctccaaggctaagggccaacctcgggagccccaagtgtataccctccctcccagccaggaggagatgaccaagaatcaagtgagcctgacctgcctcgtgaagggattttacccctccgacatcgctgtggaatgggaaagcaatggccaacctgagaacaactacaagaccacaccccccgtgctggactccgatggctccttcttcctgtacagcaggctgaccgtggacaaatcccggtggcaagagggaaacgtgttcagctgctccgtgatgcacgaggctctccacaaccactacacccagaagagcctctccctgagcctcggctagtaa

SEQ ID NO: 730 - DNA, 1350 bp, synthetic construct
  misc_feature 1..1350: note = F846C.1B2 heavy chain DNA sequence
  source 1..1350: mol_type = other DNA
cagatccagttggtgcagtctggacctgagctgaagaagcctggagagacagtcaagatctcctgcaaggcttctgggtataccttcacaaactatggaatgaattgggtgaagcaggctccaggaaagggtttaaagtggatgggctggataaacacctacactggagagccatcatatgctgatgacttcaagggacggtttgccttctctttggaaacctctgccagcactgcctatttgcagatcaacaacctcaaaaatgaggacatggctacatatttctgtgcaagatgggggggttacgctggggattactatgctatggacttctggggtcaaggaacctcagtcaccgtctcctcagctagcaccaagggccccagcgtgtttcctctcgctccctgcagccggagcacatccgagagcaccgctgctctgggctgtctcgtgaaggactacttccctgaacccgtcaccgtcagctggaatagcggcgccctgacatccggcgtccacacattccccgctgtcctgcagagcagcggcctgtacagcctgagctccgtggtcaccgtgcctagcagcagcctgggaacaaagacctacacctgcaacgtggaccataagccctccaacaccaaggtggacaagcgggtggaatccaagtatggacccccctgtcctccttgccctgctcctgaatttctcggaggcccctccgtcttcctgtttccccccaagcccaaggacaccctgatgatctcccggacacccgaagtcacctgcgtcgtggtggatgtcagccaggaagatcccgaggtgcagttcaactggtacgtggacggagtggaggtgcataacgccaaaaccaagcccagggaagagcagttcaacagcacctatcgggtcgtgtccgtgctcaccgtcctgcatcaggattggctcaacggcaaggagtacaagtgcaaggtgtccaacaagggcctgccctcctccatcgagaagaccatctccaaggctaagggccaacctcgggagccccaagtgtataccctccctcccagccaggaggagatgaccaagaatcaagtgagcctgacctgcctcgtgaagggattttacccctccgacatcgctgtggaatgggaaagcaatggccaacctgagaacaactacaagaccacaccccccgtgctggactccgatggctccttcttcctgtacagcaggctgaccgtggacaaatcccggtggcaagagggaaacgtgttcagctgctccgtgatgcacgaggctctccacaaccactacacccagaagagcctctccctgagcctcggctagtaa

SEQ ID NO: 731 - DNA, 1350 bp, synthetic construct
  misc_feature 1..1350: note = F846C.1F5 heavy chain DNA sequence
  source 1..1350: mol_type = other DNA
cagatccagttggtgcagtctggacctgagctgaagaagcctggagagacagtcaagatctcctgcaaggcttctgggtataccttcacaaactatggaatgaactgggtgaagcaggctccaggaaagggtttaaagtggatgggctggataaacacctacactggagagccatcatatgctgatgacttcaagggacggtttgccttctctttggaaacctctgccagcactgcctatttgcagatcaacaacctcaaaaatgaggacatggctacatatttctgtgcaagatgggggggttacgatggggattactatgctatggactactggggtcaaggaacctcagtcaccgtctcctcagctagcaccaagggccccagcgtgtttcctctcgctccctgcagccggagcacatccgagagcaccgctgctctgggctgtctcgtgaaggactacttccctgaacccgtcaccgtcagctggaatagcggcgccctgacatccggcgtccacacattccccgctgtcctgcagagcagcggcctgtacagcctgagctccgtggtcaccgtgcctagcagcagcctgggaacaaagacctacacctgcaacgtggaccataagccctccaacaccaaggtggacaagcgggtggaatccaagtatggacccccctgtcctccttgccctgctcctgaatttctcggaggcccctccgtcttcctgtttccccccaagcccaaggacaccctgatgatctcccggacacccgaagtcacctgcgtcgtggtggatgtcagccaggaagatcccgaggtgcagttcaactggtacgtggacggagtggaggtgcataacgccaaaaccaagcccagggaagagcagttcaacagcacctatcgggtcgtgtccgtgctcaccgtcctgcatcaggattggctcaacggcaaggagtacaagtgcaaggtgtccaacaagggcctgccctcctccatcgagaagaccatctccaaggctaagggccaacctcgggagccccaagtgtataccctccctcccagccaggaggagatgaccaagaatcaagtgagcctgacctgcctcgtgaagggattttacccctccgacatcgctgtggaatgggaaagcaatggccaacctgagaacaactacaagaccacaccccccgtgctggactccgatggctccttcttcctgtacagcaggctgaccgtggacaaatcccggtggcaagagggaaacgtgttcagctgctccgtgatgcacgaggctctccacaaccactacacccagaagagcctctccctgagcctcggctagtaa

SEQ ID NO: 732 - DNA, 1350 bp, synthetic construct
  misc_feature 1..1350: note = F846C.1H12 heavy chain DNA sequence
  source 1..1350: mol_type = other DNA
cagatccagttggtgcagtctggacctgagctgaagaagcctggagagacagtcaagatctcctgcaaggcttctgggtataccttcacaaactttggaatgaactgggtgaagcaggctccaggaaagggtttaaagtggatgggctggataaacacctacactggagagccatcatatgctgatgacttcaagggacggtttgccttctctttggaaacctctgccagcactgcctatttgcagatcaacaacctcaaaaatgaggacattgctacatatttctgtgcaagatgggggggttacgctggggattactatgctatggactactggggtcaaggaacctcagtcaccgtctcctcagctagcaccaagggccccagcgtgtttcctctcgctccctgcagccggagcacatccgagagcaccgctgctctgggctgtctcgtgaaggactacttccctgaacccgtcaccgtcagctggaatagcggcgccctgacatccggcgtccacacattccccgctgtcctgcagagcagcggcctgtacagcctgagctccgtggtcaccgtgcctagcagcagcctgggaacaaagacctacacctgcaacgtggaccataagccctccaacaccaaggtggacaagcgggtggaatccaagtatggacccccctgtcctccttgccctgctcctgaatttctcggaggcccctccgtcttcctgtttccccccaagcccaaggacaccctgatgatctcccggacacccgaagtcacctgcgtcgtggtggatgtcagccaggaagatcccgaggtgcagttcaactggtacgtggacggagtggaggtgcataacgccaaaaccaagcccagggaagagcagttcaacagcacctatcgggtcgtgtccgtgctcaccgtcctgcatcaggattggctcaacggcaaggagtacaagtgcaaggtgtccaacaagggcctgccctcctccatcgagaagaccatctccaaggctaagggccaacctcgggagccccaagtgtataccctccctcccagccaggaggagatgaccaagaatcaagtgagcctgacctgcctcgtgaagggattttacccctccgacatcgctgtggaatgggaaagcaatggccaacctgagaacaactacaagaccacaccccccgtgctggactccgatggctccttcttcctgtacagcaggctgaccgtggacaaatcccggtggcaagagggaaacgtgttcagctgctccgtgatgcacgaggctctccacaaccactacacccagaagagcctctccctgagcctcggctagtaa

SEQ ID NO: 733 - DNA, 1332 bp, synthetic construct
  misc_feature 1..1332: note = F846C.1H5 heavy chain DNA sequence
  source 1..1332: mol_type = other DNA
gaggtccagctgttggagtctgggggaggcttagtgaagcctggagggtccctgaaactctcctgtgcagcctctggattcactttcagcagctatgccatgtcttgggttcgccagactccagagaagaggctggagtgggtcgcatccattagtagtggtggtgacacctactatccagacagtgtgaagggccgattcaccatctctagagataatgccaggaacatcctgtacctgcaaatgagcagtctgaggtctgaggacacggccatgtattactgtgcaagttatggtaactccctctttgactactggggccaaggcaccactctcacagtctcctcagctagcaccaagggccccagcgtgtttcctctcgctccctgcagccggagcacatccgagagcaccgctgctctgggctgtctcgtgaaggactacttccctgaacccgtcaccgtcagctggaatagcggcgccctgacatccggcgtccacacattccccgctgtcctgcagagcagcggcctgtacagcctgagctccgtggtcaccgtgcctagcagcagcctgggaacaaagacctacacctgcaacgtggaccataagccctccaacaccaaggtggacaagcgggtggaatccaagtatggacccccctgtcctccttgccctgctcctgaatttctcggaggcccctccgtcttcctgtttccccccaagcccaaggacaccctgatgatctcccggacacccgaagtcacctgcgtcgtggtggatgtcagccaggaagatcccgaggtgcagttcaactggtacgtggacggagtggaggtgcataacgccaaaaccaagcccagggaagagcagttcaacagcacctatcgggtcgtgtccgtgctcaccgtcctgcatcaggattggctcaacggcaaggagtacaagtgcaaggtgtccaacaagggcctgccctcctccatcgagaagaccatctccaaggctaagggccaacctcgggagccccaagtgtataccctccctcccagccaggaggagatgaccaagaatcaagtgagcctgacctgcctcgtgaagggattttacccctccgacatcgctgtggaatgggaaagcaatggccaacctgagaacaactacaagaccacaccccccgtgctggactccgatggctccttcttcctgtacagcaggctgaccgtggacaaatcccggtggcaagagggaaacgtgttcagctgctccgtgatgcacgaggctctccacaaccactacacccagaagagcctctccctgagcctcggctagtaa

SEQ ID NO: 734 - DNA, 1350 bp, synthetic construct; identical to SEQ ID NO: 731
  misc_feature 1..1350: note = F846C.2H3 heavy chain DNA sequence
  source 1..1350: mol_type = other DNA

SEQ ID NO: 735 - DNA, 1326 bp, synthetic construct
  misc_feature 1..1326: note = F846TC.14A2 heavy chain DNA sequence
  source 1..1326: mol_type = other DNA
cagatccagttggtgcagtctggacctgagctgaagaagcctggagagacagtcaagatctcctgcaaggcttctgggtataccttcacaaactatggaatgaactgggtgaagcaggctccaggaaagggtttaaagtggatgggctggataaacacctacactggagagccaacatatgctggtgacctcaagggacggtttgccttctctttggaaacctctgccagcactgcctatttgcagatcaacaacctcaaaaatgaggacacggctacatatttctgtgtaagatatactatggactactggggtcaaggaacctcagtcaccgtctcctcagctagcaccaagggccccagcgtgtttcctctcgctccctgcagccggagcacatccgagagcaccgctgctctgggctgtctcgtgaaggactacttccctgaacccgtcaccgtcagctggaatagcggcgccctgacatccggcgtccacacattccccgctgtcctgcagagcagcggcctgtacagcctgagctccgtggtcaccgtgcctagcagcagcctgggaacaaagacctacacctgcaacgtggaccataagccctccaacaccaaggtggacaagcgggtggaatccaagtatggacccccctgtcctccttgccctgctcctgaatttctcggaggcccctccgtcttcctgtttccccccaagcccaaggacaccctgatgatctcccggacacccgaagtcacctgcgtcgtggtggatgtcagccaggaagatcccgaggtgcagttcaactggtacgtggacggagtggaggtgcataacgccaaaaccaagcccagggaagagcagttcaacagcacctatcgggtcgtgtccgtgctcaccgtcctgcatcaggattggctcaacggcaaggagtacaagtgcaaggtgtccaacaagggcctgccctcctccatcgagaagaccatctccaaggctaagggccaacctcgggagccccaagtgtataccctccctcccagccaggaggagatgaccaagaatcaagtgagcctgacctgcctcgtgaagggattttacccctccgacatcgctgtggaatgggaaagcaatggccaacctgagaacaactacaagaccacaccccccgtgctggactccgatggctccttcttcctgtacagcaggctgaccgtggacaaatcccggtggcaagagggaaacgtgttcagctgctccgtgatgcacgaggctctccacaaccactacacccagaagagcctctccctgagcctcggctagtaa

SEQ ID NO: 736 - DNA, 1356 bp, synthetic construct
  misc_feature 1..1356: note = F846TC.14E4 heavy chain DNA sequence
  source 1..1356: mol_type = other DNA
caggttactctgaaagagtctggccctgggatattgcagccctcccagaccctcagtctgacttgttctttctctgggttttcactgagcacttctggtatgggtgtaggctggattcgtcagccttcagggaagggtctggagtggctggcacacatttggtgggatgatgataagtactataacacagccctgaagagcgggctcacaatctccaaggatgcctccaaaaaccaggtcttcctcaagatcgccagtatggacactgcagatactgccacatactactgtgctcgaaacctctatgatggttcctacgggtactatgctatggactactggggtcaaggaacctcagtcaccgtctcctcagctagcaccaagggccccagcgtgtttcctctcgctccctgcagccggagcacatccgagagcaccgctgctctgggctgtctcgtgaaggactacttccctgaacccgtcaccgtcagctggaatagcggcgccctgacatccggcgtccacacattccccgctgtcctgcagagcagcggcctgtacagcctgagctccgtggtcaccgtgcctagcagcagcctgggaacaaagacctacacctgcaacgtggaccataagccctccaacaccaaggtggacaagcgggtggaatccaagtatggacccccctgtcctccttgccctgctcctgaatttctcggaggcccctccgtcttcctgtttccccccaagcccaaggacaccctgatgatctcccggacacccgaagtcacctgcgtcgtggtggatgtcagccaggaagatcccgaggtgcagttcaactggtacgtggacggagtggaggtgcataacgccaaaaccaagcccagggaagagcagttcaacagcacctatcgggtcgtgtccgtgctcaccgtcctgcatcaggattggctcaacggcaaggagtacaagtgcaaggtgtccaacaagggcctgccctcctccatcgagaagaccatctccaaggctaagggccaacctcgggagccccaagtgtataccctccctcccagccaggaggagatgaccaagaatcaagtgagcctgacctgcctcgtgaagggattttacccctccgacatcgctgtggaatgggaaagcaatggccaacctgagaacaactacaagaccacaccccccgtgctggactccgatggctccttcttcctgtacagcaggctgaccgtggacaaatcccggtggcaagagggaaacgtgttcagctgctccgtgatgcacgaggctctccacaaccactacacccagaagagcctctccctgagcctcggctagtaa

SEQ ID NO: 737 - DNA, 1350 bp, synthetic construct
  misc_feature 1..1350: note = F846TC.16B5 heavy chain DNA sequence
  source 1..1350: mol_type = other DNA
cagatccagttggtgcagtctggacctgagctgaagaagcctggagagacagtcaagatctcctgcaaggcttctgggtataccttcacaaactatggaatgaactgggtgaagcaggctccaggaaagggtttaaagtggatgggctggataaacacctacactggagagccagcatatgctgatgacttcaagggacggtttgccttctctttggaaacctctgccagcactgcctatttgcagatcaacaacctcaaaaatgaggacatggctacatatttctgtgcaagatgggggggttacgatggggattactatgctatggactactggggtcaaggaacctcagtcaccgtctcctcagctagcaccaagggccccagcgtgtttcctctcgctccctgcagccggagcacatccgagagcaccgctgctctgggctgtctcgtgaaggactacttccctgaacccgtcaccgtcagctggaatagcggcgccctgacatccggcgtccacacattccccgctgtcctgcagagcagcggcctgtacagcctgagctccgtggtcaccgtgcctagcagcagcctgggaacaaagacctacacctgcaacgtggaccataagccctccaacaccaaggtggacaagcgggtggaatccaagtatggacccccctgtcctccttgccctgctcctgaatttctcggaggcccctccgtcttcctgtttccccccaagcccaaggacaccctgatgatctcccggacacccgaagtcacctgcgtcgtggtggatgtcagccaggaagatcccgaggtgcagttcaactggtacgtggacggagtggaggtgcataacgccaaaaccaagcccagggaagagcagttcaacagcacctatcgggtcgtgtccgtgctcaccgtcctgcatcaggattggctcaacggcaaggagtacaagtgcaaggtgtccaacaagggcctgccctcctccatcgagaagaccatctccaaggctaagggccaacctcgggagccccaagtgtataccctccctcccagccaggaggagatgaccaagaatcaagtgagcctgacctgcctcgtgaagggattttacccctccgacatcgctgtggaatgggaaagcaatggccaacctgagaacaactacaagaccacaccccccgtgctggactccgatggctccttcttcctgtacagcaggctgaccgtggacaaatcccggtggcaagagggaaacgtgttcagctgctccgtgatgcacgaggctctccacaaccactacacccagaagagcctctccctgagcctcggctagtaa

SEQ ID NO: 738 - DNA, 1353 bp, synthetic construct
  misc_feature 1..1353: note = F846TC.7F10 heavy chain DNA sequence
  source 1..1353: mol_type = other DNA
gaagtgcagctggtggagtctgggggagacttagtgaagcctggagggtccctgaaactctcctgtgcagcctctggattcactttcagtaactatggcttgtcttggattcgccagactccagacaagaggctggagtgggtcgcaaccattagtagtggtggtagttacacctactatcctgacagtgtgaaggggcgattcaccatctccagagacagtgccaagaacaccctgtacctgcaaatgagcagtctgaagtctgaggacacagccatgtattactgtgcaagacatgcgcattactacggtgttagcccgtactactttgactactggggccaaggcacctgtctcacagtctcctcagctagcaccaagggccccagcgtgtttcctctcgctccctgcagccggagcacatccgagagcaccgctgctctgggctgtctcgtgaaggactacttccctgaacccgtcaccgtcagctggaatagcggcgccctgacatccggcgtccacacattccccgctgtcctgcagagcagcggcctgtacagcctgagctccgtggtcaccgtgcctagcagcagcctgggaacaaagacctacacctgcaacgtggaccataagccctccaacaccaaggtggacaagcgggtggaatccaagtatggacccccctgtcctccttgccctgctcctgaatttctcggaggcccctccgtcttcctgtttccccccaagcccaaggacaccctgatgatctcccggacacccgaagtcacctgcgtcgtggtggatgtcagccaggaagatcccgaggtgcagttcaactggtacgtggacggagtggaggtgcataacgccaaaaccaagcccagggaagagcagttcaacagcacctatcgggtcgtgtccgtgctcaccgtcctgcatcaggattggctcaacggcaaggagtacaagtgcaaggtgtccaacaagggcctgccctcctccatcgagaagaccatctccaaggctaagggccaacctcgggagccccaagtgtataccctccctcccagccaggaggagatgaccaagaatcaagtgagcctgacctgcctcgtgaagggattttacccctccgacatcgctgtggaatgggaaagcaatggccaacctgagaacaactacaagaccacaccccccgtgctggactccgatggctccttcttcctgtacagcaggctgaccgtggacaaatcccggtggcaagagggaaacgtgttcagctgctccgtgatgcacgaggctctccacaaccactacacccagaagagcctctccctgagcctcggctagtaa

SEQ ID NO: 739 - DNA, 1341 bp, synthetic construct
  misc_feature 1..1341: note = F847C.10B9 heavy chain DNA sequence
  source 1..1341: mol_type = other DNA
cagatccagttggtgcagtctggacctgaggtgaagaagcctggagagacagtcaagatctcctgcaaggcttctgggtatatcttcacaaactatggaatgaactgggtgaagcaggctccaggaaagggtttaaagtggatgggctggataaacacctacactggagagccaacatatactgatgacttcaagggacggtttgccttctctttggaaacctctgccagcactgcctatttgcagatcaacaacctcaaaaatgaggacacggctacatatttctgtgcaaagtttggtaactacgtgggagctatggactactggggtcaaggaacctcagtcaccgtctcctcagctagcaccaagggccccagcgtgtttcctctcgctccctgcagccggagcacatccgagagcaccgctgctctgggctgtctcgtgaaggactacttccctgaacccgtcaccgtcagctggaatagcggcgccctgacatccggcgtccacacattccccgctgtcctgcagagcagcggcctgtacagcctgagctccgtggtcaccgtgcctagcagcagcctgggaacaaagacctacacctgcaacgtggaccataagccctccaacaccaaggtggacaagcgggtggaatccaagtatggacccccctgtcctccttgccctgctcctgaatttctcggaggcccctccgtcttcctgtttccccccaagcccaaggacaccctgatgatctcccggacacccgaagtcacctgcgtcgtggtggatgtcagccaggaagatcccgaggtgcagttcaactggtacgtggacggagtggaggtgcataacgccaaaaccaagcccagggaagagcagttcaacagcacctatcgggtcgtgtccgtgctcaccgtcctgcatcaggattggctcaacggcaaggagtacaagtgcaaggtgtccaacaagggcctgccctcctccatcgagaagaccatctccaaggctaagggccaacctcgggagccccaagtgtataccctccctcccagccaggaggagatgaccaagaatcaagtgagcctgacctgcctcgtgaagggattttacccctccgacatcgctgtggaatgggaaagcaatggccaacctgagaacaactacaagaccacaccccccgtgctggactccgatggctccttcttcctgtacagcaggctgaccgtggacaaatcccggtggcaagagggaaacgtgttcagctgctccgtgatgcacgaggctctccacaaccactacacccagaagagcctctccctgagcctcggctagtaa

SEQ ID NO: 740 - DNA, 1344 bp, synthetic construct
  misc_feature 1..1344: note = F847C.11B1 heavy chain DNA sequence
  source 1..1344: mol_type = other DNA
gaggtccagcttcagcagtctggacctgagctggtgaaacctggggcctcagtgaagatatcctgcaaggcttctggaaacacattcactgaccacaacatgcactgggtgaagcagagccatggaaagagccttgagtggattggatatatttatccttacaatggtggtactggctacaaccagaagttcaagagcaaggccacattgactgtagacaattcctccagcacagtctacatggagctccgcagcctgacatctgaggactctgcagtctattactgtgcaagaggggagtatgattacctggcctggtttgcttactggggccaagggactctggtcactgtctctgcagctagcaccaagggccccagcgtgtttcctctcgctccctgcagccggagcacatccgagagcaccgctgctctgggctgtctcgtgaaggactacttccctgaacccgtcaccgtcagctggaatagcggcgccctgacatccggcgtccacacattccccgctgtcctgcagagcagcggcctgtacagcctgagctccgtggtcaccgtgcctagcagcagcctgggaacaaagacctacacctgcaacgtggaccataagccctccaacaccaaggtggacaagcgggtggaatccaagtatggacccccctgtcctccttgccctgctcctgaatttctcggaggcccctccgtcttcctgtttccccccaagcccaaggacaccctgatgatctcccggacacccgaagtcacctgcgtcgtggtggatgtcagccaggaagatcccgaggtgcagttcaactggtacgtggacggagtggaggtgcataacgccaaaaccaagcccagggaagagcagttcaacagcacctatcgggtcgtgtccgtgctcaccgtcctgcatcaggattggctcaacggcaaggagtacaagtgcaaggtgtccaacaagggcctgccctcctccatcgagaagaccatctccaaggctaagggccaacctcgggagccccaagtgtataccctccctcccagccaggaggagatgaccaagaatcaagtgagcctgacctgcctcgtgaagggattttacccctccgacatcgctgtggaatgggaaagcaatggccaacctgagaacaactacaagaccacaccccccgtgctggactccgatggctccttcttcctgtacagcaggctgaccgtggacaaatcccggtggcaagagggaaacgtgttcagctgctccgtgatgcacgaggctctccacaaccactacacccagaagagcctctccctgagcctcggctagtaa

SEQ ID NO: 741 - DNA, 1341 bp, synthetic construct
  misc_feature 1..1341: note = F847C.12F12 heavy chain DNA sequence
  source 1..1341: mol_type = other DNA
cagatccagttggtgcagtctggacctgagctgaagaagcctggagagacagtcaagatctcctgcaaggcttctgggtataccttcacaaactatggaatgaactgggtgaagcaggctccaggaaagggtttaaagtggatgggctggataaacacctacactggagagccaacatatgttgatgacttcaagggacggtttgccttctctttggaaacctctgccagcactgcctatttgcggatcaacaacctcaaaaatgaggacacggctacatatttctgtgcaaagtttggtaactacgtgggagctatggactactggggtcaaggaacctcagtcaccgtctcctcagctagcaccaagggccccagcgtgtttcctctcgctccctgcagccggagcacatccgagagcaccgctgctctgggctgtctcgtgaaggactacttccctgaacccgtcaccgtcagctggaatagcggcgccctgacatccggcgtccacacattccccgctgtcctgcagagcagcggcctgtacagcctgagctccgtggtcaccgtgcctagcagcagcctgggaacaaagacctacacctgcaacgtggaccataagccctccaacaccaaggtggacaagcgggtggaatccaagtatggacccccctgtcctccttgccctgctcctgaatttctcggaggcccctccgtcttcctgtttccccccaagcccaaggacaccctgatgatctcccggacacccgaagtcacctgcgtcgtggtggatgtcagccaggaagatcccgaggtgcagttcaactggtacgtggacggagtggaggtgcataacgccaaaaccaagcccagggaagagcagttcaacagcacctatcgggtcgtgtccgtgctcaccgtcctgcatcaggattggctcaacggcaaggagtacaagtgcaaggtgtccaacaagggcctgccctcctccatcgagaagaccatctccaaggctaagggccaacctcgggagccccaagtgtataccctccctcccagccaggaggagatgaccaagaatcaagtgagcctgacctgcctcgtgaagggattttacccctccgacatcgctgtggaatgggaaagcaatggccaacctgagaacaactacaagaccacaccccccgtgctggactccgatggctccttcttcctgtacagcaggctgaccgtggacaaatcccggtggcaagagggaaacgtgttcagctgctccgtgatgcacgaggctctccacaaccactacacccagaagagcctctccctgagcctcggctagtaa

SEQ ID NO: 742 - DNA, 1341 bp, synthetic construct; identical to SEQ ID NO: 739
  misc_feature 1..1341: note = F847C.26F5 heavy chain DNA sequence
  source 1..1341: mol_type = other DNA

SEQ ID NO: 743 - DNA, 1335 bp, synthetic construct
  misc_feature 1..1335: note = F847C.4B10 heavy chain DNA sequence
  source 1..1335: mol_type = other DNA
gaggtgcagcttgttgagactgggggaggcttagtgaagcctggagggtccctgaaactctcctgtgcagcctctggattcactttcagtagctatgccatgtcttgggttcgccagactccagagaagaggctggagtgggtcgcatccattagtagtggtggtagcacctactatccagacagtgtgaagggccgattcaccatctccagagataatgccaggaacatcctgtacctgcaaatgagcagtctgaggtctgaggacacggccatgtattactgtacaaggtttactacggtagtagagatggactactggggtcaaggaacctcagtcaccgtctcctcagctagcaccaagggccccagcgtgtttcctctcgctccctgcagccggagcacatccgagagcaccgctgctctgggctgtctcgtgaaggactacttccctgaacccgtcaccgtcagctggaatagcggcgccctgacatccggcgtccacacattccccgctgtcctgcagagcagcggcctgtacagcctgagctccgtggtcaccgtgcctagcagcagcctgggaacaaagacctacacctgcaacgtggaccataagccctccaacaccaaggtggacaagcgggtggaatccaagtatggacccccctgtcctccttgccctgctcctgaatttctcggaggcccctccgtcttcctgtttccccccaagcccaaggacaccctgatgatctcccggacacccgaagtcacctgcgtcgtggtggatgtcagccaggaagatcccgaggtgcagttcaactggtacgtggacggagtggaggtgcataacgccaaaaccaagcccagggaagagcagttcaacagcacctatcgggtcgtgtccgtgctcaccgtcctgcatcaggattggctcaacggcaaggagtacaagtgcaaggtgtccaacaagggcctgccctcctccatcgagaagaccatctccaaggctaagggccaacctcgggagccccaagtgtataccctccctcccagccaggaggagatgaccaagaatcaagtgagcctgacctgcctcgtgaagggattttacccctccgacatcgctgtggaatgggaaagcaatggccaacctgagaacaactacaagaccacaccccccgtgctggactccgatggctccttcttcctgtacagcaggctgaccgtggacaaatcccggtggcaagagggaaacgtgttcagctgctccgtgatgcacgaggctctccacaaccactacacccagaagagcctctccctgagcctcggctagtaa

SEQ ID NO: 744 - DNA, 1320 bp, synthetic construct
  misc_feature 1..1320: note = F849C.8D10 heavy chain DNA sequence
  source 1..1320: mol_type = other DNA
caggtccaactgcagcagactggtgctgagcttgtgaagcctggggcctcagtgaagctgtcctgcaaggcttctggctatactttcaccagctactggataaactgggtgaagcagaggcctggacaaggccttgagtggattggaaacatttatcctggtagtagtagtatttactacagtgagaagttcaagagtaaggccacactgactgtagacacatcctccagcacagcctacatgcagctcagcagcctgacatctgacgactctgcggtctattattgtgcaagatggggctactggggccaaggcaccactctcacagtctcctcagctagcaccaagggccccagcgtgtttcctctcgctccctgcagccggagcacatccgagagcaccgctgctctgggctgtctcgtgaaggactacttccctgaacccgtcaccgtcagctggaatagcggcgccctgacatccggcgtccacacattccccgctgtcctgcagagcagcggcctgtacagcctgagctccgtggtcaccgtgcctagcagcagcctgggaacaaagacctacacctgcaacgtggaccataagccctccaacaccaaggtggacaagcgggtggaatccaagtatggacccccctgtcctccttgccctgctcctgaatttctcggaggcccctccgtcttcctgtttccccccaagcccaaggacaccctgatgatctcccggacacccgaagtcacctgcgtcgtggtggatgtcagccaggaagatcccgaggtgcagttcaactggtacgtggacggagtggaggtgcataacgccaaaaccaagcccagggaagagcagttcaacagcacctatcgggtcgtgtccgtgctcaccgtcctgcatcaggattggctcaacggcaaggagtacaagtgcaaggtgtccaacaagggcctgccctcctccatcgagaagaccatctccaaggctaagggccaacctcgggagccccaagtgtataccctccctcccagccaggaggagatgaccaagaatcaagtgagcctgacctgcctcgtgaagggattttacccctccgacatcgctgtggaatgggaaagcaatggccaacctgagaacaactacaagaccacaccccccgtgctggactccgatggctccttcttcctgtacagcaggctgaccgtggacaaatcccggtggcaagagggaaacgtgttcagctgctccgtgatgcacgaggctctccacaaccactacacccagaagagcctctccctgagcctcggctagtaa

SEQ ID NO: 745 - DNA, 1347 bp, synthetic construct
  misc_feature 1..1347: note = F849C.8H3 heavy chain DNA sequence
  source 1..1347: mol_type = other DNA
caggttactctgaaagagtctggccctgggatattgcagccctcccagaccctcagtctgacttgttctttctctgggttttcactgagcacttttggtatgggtgtaggctggattcgtcagccttcagggaagggtctggagtggctggcacacatttggtgggatgatgataaacactataacccagccctgaagagccggctcacaatctccaaggatacctccaaaaaccaggtcttcctcaggatcgccaatgtggacactgcagataatgccacatattactgtgctcgaatcgactatggtgactacgtcgggtttgcttattggggccaagggactctggtcactgtctctgcagctagcaccaagggccccagcgtgtttcctctcgctccctgcagccggagcacatccgagagcaccgctgctctgggctgtctcgtgaaggactacttccctgaacccgtcaccgtcagctggaatagcggcgccctgacatccggcgtccacacattccccgctgtcctgcagagcagcggcctgtacagcctgagctccgtggtcaccgtgcctagcagcagcctgggaacaaagacctacacctgcaacgtggaccataagccctccaacaccaaggtggacaagcgggtggaatccaagtatggacccccctgtcctccttgccctgctcctgaatttctcggaggcccctccgtcttcctgtttccccccaagcccaaggacaccctgatgatctcccggacacccgaagtcacctgcgtcgtggtggatgtcagccaggaagatcccgaggtgcagttcaactggtacgtggacggagtggaggtgcataacgccaaaaccaagcccagggaagagcagttcaacagcacctatcgggtcgtgtccgtgctcaccgtcctgcatcaggattggctcaacggcaaggagtacaagtgcaaggtgtccaacaagggcctgccctcctccatcgagaagaccatctccaaggctaagggccaacctcgggagccccaagtgtataccctccctcccagccaggaggagatgaccaagaatcaagtgagcctgacctgcctcgtgaagggattttacccctccgacatcgctgtggaatgggaaagcaatggccaacctgagaacaactacaagaccacaccccccgtgctggactccgatggctccttcttcctgtacagcaggctgaccgtggacaaatcccggtggcaagagggaaacgtgttcagctgctccgtgatgcacgaggctctccacaaccactacacccagaagagcctctccctgagcctcggctagtaa

SEQ ID NO: 746 - DNA, 1338 bp, synthetic construct
  misc_feature 1..1338: note = 846.2B11 heavy chain DNA sequence
  source 1..1338: mol_type = other DNA
caggtccagctacagcagtctggacctgagctggtgaggcctggggctttagtgaagatttcctgcaaggcttctggttacaccttcacaagctacgatataaactgggtgaagcagaggcctggacagggacttgagtggattggatggatttatcctggagatggtagtactaaatataatgagaaattcaagggcaaggccacactgactgcagacaaatcctccagcacagcctacatgcagctcagcagcctgacttctgagaactctgcagtctatttctgtgcaagagaggcggcttctaatgctatggactactggggtcaaggaacctcagtcaccgtctcctcagctagcaccaagggccccagcgtgtttcctctcgctccctgcagccggagcacatccgagagcaccgctgctctgggctgtctcgtgaaggactacttccctgaacccgtcaccgtcagctggaatagcggcgccctgacatccggcgtccacacattccccgctgtcctgcagagcagcggcctgtacagcctgagctccgtggtcaccgtgcctagcagcagcctgggaacaaagacctacacctgcaacgtggaccataagccctccaacaccaaggtggacaagcgggtggaatccaagtatggacccccctgtcctccttgccctgctcctgaatttctcggaggcccctccgtcttcctgtttccccccaagcccaaggacaccctgatgatctcccggacacccgaagtcacctgcgtcgtggtggatgtcagccaggaagatcccgaggtgcagttcaactggtacgtggacggagtggaggtgcataacgccaaaaccaagcccagggaagagcagttcaacagcacctatcgggtcgtgtccgtgctcaccgtcctgcatcaggattggctcaacggcaaggagtacaagtgcaaggtgtccaacaagggcctgccctcctccatcgagaagaccatctccaaggctaagggccaacctcgggagccccaagtgtataccctccctcccagccaggaggagatgaccaagaatcaagtgagcctgacctgcctcgtgaagggattttacccctccgacatcgctgtggaatgggaaagcaatggccaacctgagaacaactacaagaccacaccccccgtgctggactccgatggctccttcttcctgtacagcaggctgaccgtggacaaatcccggtggcaagagggaaacgtgttcagctgctccgtgatgcacgaggctctccacaaccactacacccagaagagcctctccctgagcctcggctagtaa

SEQ ID NO: 747 - DNA, 1350 bp, synthetic construct
  misc_feature 1..1350: note = 846.4D5 heavy chain DNA sequence
  source 1..1350: mol_type = other DNA
gaagtgaagcttgaggagtctggaggaggcttggtgcaacctggaggatccatgaaactctcctgtgttgcctctggattcactttcagtaactactggatgaactgggtccgccagtctccagagaaggggcttgagtgggttgctgaaattagattgaaatctaataattatgcaacacattatgcggagtctgtgaaagggaggttcaccatctcaagagatgattccaaaagtagtgtctacctgcaaatgaacaacttaagagctgaagacactggcatttattactgtaccaggcactacggctttccctactggtacttcgatgtctggggcgcagggaccacggtcaccgtctcctcagctagcaccaagggccccagcgtgtttcctctcgctccctgcagccggagcacatccgagagcaccgctgctctgggctgtctcgtgaaggactacttccctgaacccgtcaccgtcagctggaatagcggcgccctgacatccggcgtccacacattccccgctgtcctgcagagcagcggcctgtacagcctgagctccgtggtcaccgtgcctagcagcagcctgggaacaaagacctacacctgcaacgtggaccataagccctccaacaccaaggtggacaagcgggtggaatccaagtatggacccccctgtcctccttgccctgctcctgaatttctcggaggcccctccgtcttcctgtttccccccaagcccaaggacaccctgatgatctcccggacacccgaagtcacctgcgtcgtggtggatgtcagccaggaagatcccgaggtgcagttcaactggtacgtggacggagtggaggtgcataacgccaaaaccaagcccagggaagagcagttcaacagcacctatcgggtcgtgtccgtgctcaccgtcctgcatcaggattggctcaacggcaaggagtacaagtgcaaggtgtccaacaagggcctgccctcctccatcgagaagaccatctccaaggctaagggccaacctcgggagccccaagtgtataccctccctcccagccaggaggagatgaccaagaatcaagtgagcctgacctgcctcgtgaagggattttacccctccgacatcgctgtggaatgggaaagcaatggccaacctgagaacaactacaagaccacaccccccgtgctggactccgatggctccttcttcctgtacagcaggctgaccgtggacaaatcccggtggcaagagggaaacgtgttcagctgctccgtgatgcacgaggctctccacaaccactacacccagaagagcctctccctgagcctcggctagtaa

SEQ ID NO: 748 - DNA, 1338 bp, synthetic construct
  misc_feature 1..1338: note = 846T.1H2 heavy chain DNA sequence
  source 1..1338: mol_type = other DNA
cagatccagttggtgcagtctggacctgagctgaagaagcctggagagacagtcaagatctcctgcaaggcttctgggtataccttcacaaactatggaatgaactgggtgaagcaggctccaggaaagggtttaaagtggatgggctggataaacaccaacactggagagccaacatatgctgaagagttcaagggacggtttgccttctctttggaaacctctgccagcactgcctatttgcagatcaacaacctcaaaaatgaggacacggctacatatttctgtgcaaccggggggggtaactgggactttgactactggggccaaggcaccactctcacagtctcctcagctagcaccaagggccccagcgtgtttcctctcgctccctgcagccggagcacatccgagagcaccgctgctctgggctgtctcgtgaaggactacttccctgaacccgtcaccgtcagctggaatagcggcgccctgacatccggcgtccacacattccccgctgtcctgcagagcagcggcctgtacagcctgagctccgtggtcaccgtgcctagcagcagcctgggaacaaagacctacacctgcaacgtggaccataagccctccaacaccaaggtggacaagcgggtggaatccaagtatggacccccctgtcctccttgccctgctcctgaatttctcggaggcccctccgtcttcctgtttccccccaagcccaaggacaccctgatgatctcccggacacccgaagtcacctgcgtcgtggtggatgtcagccaggaagatcccgaggtgcagttcaactggtacgtggacggagtggaggtgcataacgccaaaaccaagcccagggaagagcagttcaacagcacctatcgggtcgtgtccgtgctcaccgtcctgcatcaggattggctcaacggcaaggagtacaagtgcaaggtgtccaacaagggcctgccctcctccatcgagaagaccatctccaaggctaagggccaacctcgggagccccaagtgtataccctccctcccagccaggaggagatgaccaagaatcaagtgagcctgacctgcctcgtgaagggattttacccctccgacatcgctgtggaatgggaaagcaatggccaacctgagaacaactacaagaccacaccccccgtgctggactccgatggctccttcttcctgtacagcaggctgaccgtggacaaatcccggtggcaagagggaaacgtgttcagctgctccgtgatgcacgaggctctccacaaccactacacccagaagagcctctccctgagcctcggctagtaa

SEQ ID NO: 749 - DNA, 1326 bp, synthetic construct
  misc_feature 1..1326: note = 847.14H4 heavy chain DNA sequence
  source 1..1326: mol_type = other DNA
cagatccagttggtgcagtctggacctgaactgacgaagcctggagagacagtcaagatctcctgtaaggcttctggctataccttcacagactatggaatgaactgggtgaggcaggctccaggagagactttaaagtggatgggctggataaacacctacactggagagccaacatatgctgatgacttcaaggggcggtttgccttctctttggaatcctctgccagcactgcctatttgcagatcaacaacctcaaaaatgaggacgtggctacatatttctgtgcaagataccctatggactactggggtcaaggaacctcagtcaccgtctcctcagctagcaccaagggccccagcgtgtttcctctcgctccctgcagccggagcacatccgagagcaccgctgctctgggctgtctcgtgaaggactacttccctgaacccgtcaccgtcagctggaatagcggcgccctgacatccggcgtccacacattccccgctgtcctgcagagcagcggcctgtacagcctgagctccgtggtcaccgtgcctagcagcagcctgggaacaaagacctacacctgcaacgtggaccataagccctccaacaccaaggtggacaagcgggtggaatccaagtatggacccccctgtcctccttgccctgctcctgaatttctcggaggcccctccgtcttcctgtttccccccaagcccaaggacaccctgatgatctcccggacacccgaagtcacctgcgtcgtggtggatgtcagccaggaagatcccgaggtgcagttcaactggtacgtggacggagtggaggtgcataacgccaaaaccaagcccagggaagagcagttcaacagcacctatcgggtcgtgtccgtgctcaccgtcctgcatcaggattggctcaacggcaaggagtacaagtgcaaggtgtccaacaagggcctgccctcctccatcgagaagaccatctccaaggctaagggccaacctcgggagccccaagtgtataccctccctcccagccaggaggagatgaccaagaatcaagtgagcctgacctgcctcgtgaagggattttacccctccgacatcgctgtggaatgggaaagcaatggccaacctgagaacaactacaagaccacaccccccgtgctggactccgatggctccttcttcctgtacagcaggctgaccgtggacaaatcccggtggcaagagggaaacgtgttcagctgctccgtgatgcacgaggctctccacaaccactacacccagaagagcctctccctgagcctcggctagtaa

SEQ ID NO: 750 - DNA, 663 bp, synthetic construct
  misc_feature 1..663: note = TB001 light chain DNA sequence
  source 1..663: mol_type = other DNA
gacatcgtgctgacccagtctccactgagcctgcctgttacacctggcgagccagcctccatctcctgcagatcctctaagtccctgctgtacaaggacggcaagacctacctgaactggttcctgcagaagcccggccagtctcctcagctcctgatctacctgatgagcacccatgcctctggcgtgcccgatagattttccggctctggctctggcaccgacttcaccctgaagatctccagagtggaagccgaggacgtgggcgtgtactactgtcagcagctggtggactaccctctgacctttggcggcggaacaaagctggaaatcaagcggacagtggccgctccttccgtgttcatcttcccaccttccgacgagcagctgaagtccggcacagcttctgtcgtgtgcctgctgaacaacttctaccctcgggaagccaaggtgcagtggaaggtggacaatgccctgcagtccggcaactcccaagagtctgtgaccgagcaggactccaaggacagcacctacagcctgtcctccacactgaccctgtccaaggccgactacgagaagcacaaggtgtacgcctgcgaagtgacccatcagggcctgtctagccctgtgaccaagtctttcaaccggggcgagtgctgatga

SEQ ID NO: 751 - DNA, 660 bp, synthetic construct
  misc_feature 1..660: note = TB006 light chain DNA sequence
  source 1..660: mol_type = other DNA
gatatagtgatgacccaaacacctttgtccctgtcagtcaccccaggccaacccgcatctatctcatgcaaatcctcaaaaagtcttttgcactctgacgggataacatatctctactggtatcttcaaaaacctggtcagtccccccagctcttgatctatagaatgagtaaccttgcctctggtgtccccgaccggtttagtggaagcgggtctgggaccgacttcaccctcaagattagtcgcgtcgaagccgaagatgtgggagtgtattactgtgcccagatgctcgaatttcccctgacatttggtcaaggaactaaattggagattaagcggaccgtggccgcccccagcgtgttcatcttccctcccagcgacgagcagctgaagtctggcaccgccagcgtggtgtgcctgctgaacaacttctacccccgcgaggccaaggtgcagtggaaggtggacaacgccctgcagagcggcaacagccaggagagcgtgaccgagcaggactccaaggacagcacctacagcctgagcagcaccctgaccctgagcaaggccgactacgagaagcacaaggtgtacgcctgcgaggtgacccaccagggactgtctagccccgtgaccaagagcttcaaccggggcgagtgctaa

SEQ ID NO: 752 - DNA, 645 bp, synthetic construct
  misc_feature 1..645: note = 12G5.D7 light chain DNA sequence
  source 1..645: mol_type = other DNA
gacatcctgatgacccaatctccatcctccatgtctgtatctctgggagacacagtcagcatcacttgccatgcaagtcagggcattaactctaatatggggtggttgcagcagaaaccagggaaatcatttaagggcctgatctatcatgcaaccaacttggaagatggagttccatcaaggttcagtggcagtggatctggagcagattattctctcaccatcagcagcctggaatctgaagattttgcagactattactgtgtacagtatgctcagtttcctcctacgttcggatcggggaccaagctggaaataaaacggaccgtggccgcccccagcgtgttcatcttccctcccagcgacgagcagctgaagtctggcaccgccagcgtggtgtgcctgctgaacaacttctacccccgcgaggccaaggtgcagtggaaggtggacaacgccctgcagagcggcaacagccaggagagcgtgaccgagcaggactccaaggacagcacctacagcctgagcagcaccctgaccctgagcaaggccgactacgagaagcacaaggtgtacgcctgcgaggtgacccaccagggactgtctagccccgtgaccaagagcttcaaccggggcgagtgctaa

SEQ ID NO: 753 - DNA, 660 bp, synthetic construct
  misc_feature 1..660: note = 13A12.2E5 light chain DNA sequence
  source 1..660: mol_type = other DNA
gatgttgtgatgacccagactccactcactttgtcggttgccattggacaaccagcttccatctcttgcaagtcgagtcagagcctcttatatactaatggaaaaacctatttgaattggttattacagaggccaggccagtctccaaaacgcctaatctatctgctgtctaaattggactctggagtccctgacaggttcagtgccagtggatcagggacagatttcacactgaaaatcagcagagtggaggctgaggatttgggagtttattactgcttgcagagtacacattttccgctcacgttcggtgctgggaccaagctggagatgaaacggaccgtggccgcccccagcgtgttcatcttccctcccagcgacgagcagctgaagtctggcaccgccagcgtggtgtgcctgctgaacaacttctacccccgcgaggccaaggtgcagtggaaggtggacaacgccctgcagagcggcaacagccaggagagcgtgaccgagcaggactccaaggacagcacctacagcctgagcagcaccctgaccctgagcaaggccgactacgagaagcacaaggtgtacgcctgcgaggtgacccaccagggactgtctagccccgtgaccaagagcttcaaccggggcgagtgctaa

SEQ ID NO: 754 - DNA, 660 bp, synthetic construct
  misc_feature 1..660: note = 14H10.2C9 light chain DNA sequence
  source 1..660: mol_type = other DNA
gatgttgtgatgacccagactccactcactttgtcggttaccattggacaaccagcctccatctcttgcaagtcaagtcagagcctcttcgatagtgatggaaagacatatttgaattggttgttacagaggccaggccagtctccaaagcgcctaatctatctggtgtctaaactggactctggagtccctgacaggttcactggcagtggatcagggacagatttcacactgaaaatcagcagagtggaggctgaggatttgggagtttattattgctggcaaggtacacattttcctctcacgttcggtgctgggaccaagctggaaatgaaacggaccgtggccgcccccagcgtgttcatcttccctcccagcgacgagcagctgaagtctggcaccgccagcgtggtgtgcctgctgaacaacttctacccccgcgaggccaaggtgcagtggaaggtggacaacgccctgcagagcggcaacagccaggagagcgtgaccgagcaggactccaaggacagcacctacagcctgagcagcaccctgaccctgagcaaggccgactacgagaagcacaaggtgtacgcctgcgaggtgacccaccagggactgtctagccccgtgaccaagagcttcaaccggggcgagtgctaa

SEQ ID NO: 755 - DNA, 660 bp, synthetic construct
  misc_feature 1..660: note = 15F10.2D6 light chain DNA sequence
  source 1..660: mol_type = other DNA
gatgttttgatgacccaaactccactctccctgcctgtcagtcttggagatcaagcctccatctcttgcagatctagtcagagcattgtacataataatggaaacacctatttagaatggtacctgcagaaaccaggccagtctccaaaactcctgatctacaaagtttccaaccgattttctggggtcccagacaggttcagtggcagtggatcagggacagatttcacactcaagatcagcagagtggaggctgaggatctgggagtttattactgctttcaaggttcacatgttccgctcacgttcggtggtgggaccaagttggagctgaaacggaccgtggccgcccccagcgtgttcatcttccctcccagcgacgagcagctgaagtctggcaccgccagcgtggtgtgcctgctgaacaacttctacccccgcgaggccaaggtgcagtggaaggtggacaacgccctgcagagcggcaacagccaggagagcgtgaccgagcaggactccaaggacagcacctacagcctgagcagcaccctgaccctgagcaaggccgactacgagaagcacaaggtgtacgcctgcgaggtgacccaccagggactgtctagccccgtgaccaagagcttcaaccggggcgagtgctaa

SEQ ID NO: 756 - DNA, 645 bp, synthetic construct
  misc_feature 1..645: note = 19B5.2E6 light chain DNA sequence
  source 1..645: mol_type = other DNA
gatatacaaatgactcaaactacctcttctctttccgcatctttgggtgatcgggtcactatatcctgctccgcctctcaaggcataaacaattacctgaattggtatcagcaaaaaccagacggaactgtaaaattgcttatctactacgcttcaagtctgcatagtggggttcccagcagattttccggttccgggtccggcactgattattctctcacaattagtaacctggaacctgaggacattgcaacttattactgtcaacaatacagtcaggtaccttacactttcggatcaggaacaaagttggaaatcaagaggaccgtggccgcccccagcgtgttcatcttccctcccagcgacgagcagctgaagtctggcaccgccagcgtggtgtgcctgctgaacaacttctacccccgcgaggccaaggtgcagtggaaggtggacaacgccctgcagagcggcaacagccaggagagcgtgaccgagcaggactccaaggacagcacctacagcctgagcagcaccctgaccctgagcaaggccgactacgagaagcacaaggtgtacgcctgcgaggtgacccaccagggactgtctagccccgtgaccaagagcttcaaccggggcgagtgctaa

SEQ ID NO: 757 - DNA, 645 bp, synthetic construct
  misc_feature 1..645: note = 20D11.2C6 light chain DNA sequence
  source 1..645: mol_type = other DNA
gacatccagatgaaccagtctccatccagtctgtctgcatccctcggagacacaattaccatcacttgccgtgccagtcagaacatttatatttggttaagttggtaccagcagaaaccaggaaatattcctaaactcttgatctataaggcttccaacttgcacacaggcgtcccatcaaggtttagtggcagtggatctggaacagatttcacattaaccatcagcactctgcagcctgaagacattgccacttacttctgtctccagggtcaaagttatcctctcacgttcggtgctgggaccaagctggagatgaaacggaccgtggccgcccccagcgtgttcatcttccctcccagcgacgagcagctgaagtctggcaccgccagcgtggtgtgcctgctgaacaacttctacccccgcgaggccaaggtgcagtggaaggtggacaacgccctgcagagcggcaacagccaggagagcgtgaccgagcaggactccaaggacagcacctacagcctgagcagcaccctgaccctgagcaaggccgactacgagaagcacaaggtgtacgcctgcgaggtgacccaccagggactgtctagccccgtgaccaagagcttcaaccggggcgagtgctaa

SEQ ID NO: 758 - DNA, 648 bp, synthetic construct
  misc_feature 1..648: note = 20H5.A3 light chain DNA sequence
  source 1..648: mol_type = other DNA
gatatccagatgacacagactacatcctccctgtctgcctctctgggagacagagtcaccatcaattgcagtgcaagtcaggacattagcaattatttaaactggtatcagcagaaaccagatggaactgttaaactcctgatctattacacatcaagtttactctcaggagtcccatcaaggttcagtggcagtgggtctgggacagattattctctcaccatcagcaacctggaacctgaagatattgccacttacttttgtcagcaatatagtaagcttccctatacgttcggatcggggacccacctggaaataaaacgtgctgatgttgcccctactgtgtccatcttccccccctcctccgagcagctgacatccggcggcgcctccgtggtgtgcttcctgaacaacttctaccccaaagacatcaacgtgaaatggaaaatcgacggctccgagaggcagaacggcgtgctgaactcctggacagaccaggactccaaagactccacatactccatgtcctccacactgacactgacaaaagacgagtacgagaggcacaactcctacacatgcgaggccacacacaaaacatccacatcccccatcgtgaaatccttcaacaggaacgagtgctaataa

SEQ ID NO: 759 - DNA, 645 bp, synthetic construct
  misc_feature 1..645: note = 23H9.2E4 light chain DNA sequence
  source 1..645: mol_type = other DNA
gatatccagatgacacagactacatcctccctgtctgcctctctgggagacagagtcaccatcagttgcagtgcaagtcagggcattaacaattatttaaactggtatcagcagaaaccagatggaactgttaaactcctgatctattacgcatcaagtttacactcaggagtcccatcaaggttcagtggcagtgggtctgggacagattattctctcaccatcagcaacctggaacctgaagatattgccacttactattgtcagcagtatagtcaggttccgtatacgttcggatcggggaccaagttggaaataaaacggaccgtggccgcccccagcgtgttcatcttccctcccagcgacgagcagctgaagtctggcaccgccagcgtggtgtgcctgctgaacaacttctacccccgcgaggccaaggtgcagtggaaggtggacaacgccctgcagagcggcaacagccaggagagcgtgaccgagcaggactccaaggacagcacctacagcctgagcagcaccctgaccctgagcaaggccgactacgagaagcacaaggtgtacgcctgcgaggtgacccaccagggactgtctagccccgtgaccaagagcttcaaccggggcgagtgctaa

SEQ ID NO: 760 - DNA, 660 bp, synthetic construct
  misc_feature 1..660: note = 2D10-VH0-VL0 light chain DNA sequence
  source 1..660: mol_type = other DNA
gacatagtaatgacacaggccgcatttagcaatccagtaaccttgggcacatccgcctccatatcttgcaggtcatccaaaagcttgctgcactctgacggtattacttacctgtactggtatttgcagcgacctgggcaatcccctcaactcctgatttaccgcatgagcaacctggcctcaggggtgcctgaccgcttttcaggatcagggagcggcactgacttcaccttgcgaatcagcagagtagaagcagaggatgttggagtttactactgtgcccagatgatcgaatttccacttacttttggggccgggaccattctggagcttaaacggaccgtggccgcccccagcgtgttcatcttccctcccagcgacgagcagctgaagtctggcaccgccagcgtggtgtgcctgctgaacaacttctacccccgcgaggccaaggtgcagtggaaggtggacaacgccctgcagagcggcaacagccaggagagcgtgaccgagcaggactccaaggacagcacctacagcctgagcagcaccctgaccctgagcaaggccgactacgagaagcacaaggtgtacgcctgcgaggtgacccaccagggactgtctagccccgtgaccaagagcttcaaccggggcgagtgctaa

SEQ ID NO: 761 - DNA, 660 bp, synthetic construct
  misc_feature 1..660: note = 3B11.2G2 light chain DNA sequence
  source 1..660: mol_type = other DNA
gatgttgtgatgacccagactccactcactttgtcggttgccattggacaaccagcttccatctcttgcaagtcgagtcagagcctcttatatactaatggaaaaacctatttgaattggttattacagaggccaggccagtctccaaaacgcctaatctatctggtgtctaaattggactctggagtccctgacaggttcagtggcagtggatcagggacagatttcacactgaaaatcagcagagtggaggctgaggatttgggagtttattactgcttgcagagtacacattttccgctcacgttcggtgctgggaccaagctggagctgaaacggaccgtggccgcccccagcgtgttcatcttccctcccagcgacgagcagctgaagtctggcaccgccagcgtggtgtgcctgctgaacaacttctacccccgcgaggccaaggtgcagtggaaggtggacaacgccctgcagagcggcaacagccaggagagcgtgaccgagcaggactccaaggacagcacctacagcctgagcagcaccctgaccctgagcaaggccgactacgagaagcacaaggtgtacgcctgcgaggtgacccaccagggactgtctagccccgtgaccaagagcttcaaccggggcgagtgctaa

SEQ ID NO: 762 - DNA, 660 bp, synthetic construct
  misc_feature 1..660: note = 7D8.2D8 light chain DNA sequence
  source 1..660: mol_type = other DNA
gatgttttgatgacccaaactccactctccctgcctgtcagtcttggagatcaagcctccatctcttgcagatctagtcagagcattgtacatagtaatggaaacacctatttagaatggtacctgcagaaaccaggccagtctccaaagctcctgatctacaaagtttccaaccgattttctggggtcccagacaggttcagtggcagtggatcagggacagatttcacactcaagatcagcagagtggaggctgaggatctgggagtttattactgctttcaaggttcacatgttccgctcacgttcggtgctgggaccaagctggagctgaaacggaccgtggccgcccccagcgtgttcatcttccctcccagcgacgagcagctgaagtctggcaccgccagcgtggtgtgcctgctgaacaacttctacccccgcgaggccaaggtgcagtggaaggtggacaacgccctgcagagcggcaacagccaggagagcgtgaccgagcaggactccaaggacagcacctacagcctgagcagcaccctgaccctgagcaaggccgactacgagaagcacaaggtgtacgcctgcgaggtgacccaccagggactgtctagccccgtgaccaagagcttcaaccggggcgagtgctaa

SEQ ID NO: 763 - DNA, 663 bp, synthetic construct
  misc_feature 1..663: note = mIMT001 light chain DNA sequence
  source 1..663: mol_type = other DNA
gatattgttattactcaggatgagcttagtaatcctgtcactagcggggaaagtgttagtatcagttgtcgttcatccaagtcactcctctacaaagacggcaagacttatctcaactggtttcttcaacgacccggtcaatctccacagctcctgatttacctgatgtcaactcacgcttctggtgttagcgaccgtttctccggaagtggctccgggacagacttcactcttgaaatctcacgtgtaaaagcagaggacgtaggtgtctattattgtcaacagcttgtggactaccccttgacctttggcgctggcacaaagctggaactgaagcgtgctgatgttgcccctactgtgtccatcttccccccctcctccgagcagctgacatccggcggcgcctccgtggtgtgcttcctgaacaacttctaccccaaagacatcaacgtgaaatggaaaatcgacggctccgagaggcagaacggcgtgctgaactcctggacagaccaggactccaaagactccacatactccatgtcctccacactgacactgacaaaagacgagtacgagaggcacaactcctacacatgcgaggccacacacaaaacatccacatcccccatcgtgaaatccttcaacaggaacgagtgctaataa

SEQ ID NO: 764 - DNA, 660 bp, synthetic construct
  misc_feature 1..660: note = 4A11.2B5 light chain DNA sequence
  source 1..660: mol_type = other DNA
gacattgtgatgactcaggcagccttttccaaccctgtaacacttggaactagtgcctccatctcatgccgttccagcaagagtcttttgcacagcgatgggataacctatctctattggtatctgcaacgacccggtcagtcaccccaacttcttatctatcgaatgtctaacttggcctccggcgtgcccgaccgcttttccgggagtgggagcggtacagatttcaccttgcgaatttcccgggttgaggcagaggacgtaggtgtctactattgtgctcagatgcttgagtttcctctcactttcggagccggcaccaaactggaactgaaacggaccgtggccgcccccagcgtgttcatcttccctcccagcgacgagcagctgaagtctggcaccgccagcgtggtgtgcctgctgaacaacttctacccccgcgaggccaaggtgcagtggaaggtggacaacgccctgcagagcggcaacagccaggagagcgtgaccgagcaggactccaaggacagcacctacagcctgagcagcaccctgaccctgagcaaggccgactacgagaagcacaaggtgtacgcctgcgaggtgacccaccagggactgtctagccccgtgaccaagagcttcaaccggggcgagtgctaa

SEQ ID NO: 765 - DNA, 660 bp, synthetic construct; identical to SEQ ID NO: 751
  misc_feature 1..660: note = 4A11.H1L1 light chain DNA sequence
  source 1..660: mol_type = other DNA

SEQ ID NO: 766 - DNA, 660 bp, synthetic construct
  misc_feature 1..660: note = 4A11.H4L2 light chain DNA sequence
  source 1..660: mol_type = other DNA
gatattgtaatgacccaaagccccctgtccttgcctgttaccccaggtgagcctgccagcatatcttgccgatccagtaaatctctgcttcatagcgatggcatcacctatttgtattggtatttgcagaagcccggccagagcccccagttgctgatctacagaatgtccaaccttgctagtggagtgcccgaccggtttagcggttcaggctcagggactgatttcactcttaaaatcagtagggtagaggccgaagacgttggtgtatattattgtgctcagatgttggagtttccactcacatttggacaaggtacaaagctggaaattaagcggaccgtggccgcccccagcgtgttcatcttccctcccagcgacgagcagctgaagtctggcaccgccagcgtggtgtgcctgctgaacaacttctacccccgcgaggccaaggtgcagtggaaggtggacaacgccctgcagagcggcaacagccaggagagcgtgaccgagcaggactccaaggacagcacctacagcctgagcagcaccctgaccctgagcaaggccgactacgagaagcacaaggtgtacgcctgcgaggtgacccaccagggactgtctagccccgtgaccaagagcttcaaccggggcgagtgctaa

SEQ ID NO: 767 - DNA, 660 bp, synthetic construct
  misc_feature 1..660: note = 4G2.2G6 light chain DNA sequence
  source 1..660: mol_type = other DNA
gatgtcgtaatgactcaaacccccctgacccttagtgttactataggccagcccgcaagcatctcctgcaaatcctcccagtctcttctttatactgatggcaaaacctacttgtcctggtttttgcagcgcccaggtcaaagtcctaaacgtcttatttacttggtctctaaactcgattccggcgtgcctgaccggttctccggtagcggtagcggtaccgatttcactttgaagattagccgagttgaggcagaagacctcggggtctactactgccttcagagtacacacttcccacttacatttggcgcaggaaccaagttggaggttaaacggaccgtggccgcccccagcgtgttcatcttccctcccagcgacgagcagctgaagtctggcaccgccagcgtggtgtgcctgctgaacaacttctacccccgcgaggccaaggtgcagtggaaggtggacaacgccctgcagagcggcaacagccaggagagcgtgaccgagcaggactccaaggacagcacctacagcctgagcagcaccctgaccctgagcaaggccgactacgagaagcacaaggtgtacgcctgcgaggtgacccaccagggactgtctagccccgtgaccaagagcttcaaccggggcgagtgctaa

SEQ ID NO: 768 - DNA, 645 bp, synthetic construct
  misc_feature 1..645: note = 6B3.2D3 light chain DNA sequence
  source 1..645: mol_type = other DNA
agtattgtgatgacccagactcccaaattcctgcttgtatcagcaggagacagggttaccataacctgcaaggccagtcagagtgtgagtaatgatgtagcttggtaccaacagaagccagggcagtctcctaaattgttgatatattatgcatccaatcgctacactggagtccctgatcgcttcactggcagtggatatgggacggatttcactttcaccatcagcactgtgcaggctgaagacctggcagtttatttctgtcagcaggattatacctctccgtacacgttcggaggggggaccaagctggaaataaaacggaccgtggccgcccccagcgtgttcatcttccctcccagcgacgagcagctgaagtctggcaccgccagcgtggtgtgcctgctgaacaacttctacccccgcgaggccaaggtgcagtggaaggtggacaacgccctgcagagcggcaacagccaggagagcgtgaccgagcaggactccaaggacagcacctacagcctgagcagcaccctgaccctgagcaaggccgactacgagaagcacaaggtgtacgcctgcgaggtgacccaccagggactgtctagccccgtgaccaagagcttcaaccggggcgagtgctaa

SEQ ID NO: 769 - DNA, 645 bp, synthetic construct
  misc_feature 1..645: note = 6H6.2D6 light chain DNA sequence
  source 1..645: mol_type = other DNA
gacatccagatgacccagaccacctcctccctgtccgcctccctgggcgacagggtgaccatctcctgctccgcctcccagggcatctccaactacctgaactggtaccagcagaagcccgacggcaccgtgaagctgctgatctactacacctcctccctgcactccggcgtgccctccaggttctccggctccggctccggcaccgactactccctgaccatctccaacctggagcccgaggacatcgccacctactactgccagcagtactccgagctgccctacaccttcggctccggcaccaagctggagatcaagaggaccgtggccgcccccagcgtgttcatcttccctcccagcgacgagcagctgaagtctggcaccgccagcgtggtgtgcctgctgaacaacttctacccccgcgaggccaaggtgcagtggaaggtggacaacgccctgcagagcggcaacagccaggagagcgtgaccgagcaggactccaaggacagcacctacagcctgagcagcaccctgaccctgagcaaggccgactacgagaagcacaaggtgtacgcctgcgaggtgacccaccagggactgtctagccccgtgaccaagagcttcaaccggggcgagtgctaa

SEQ ID NO: 770 - DNA, 645 bp, synthetic construct
  misc_feature 1..645: note = 9H2.2H10 light chain DNA sequence
  source 1..645: mol_type = other DNA
gacattgtgatgacccagtctcacaaattcatgtccacatcagtaggagacagggtcagcatcacctgcaaggccagtcaggatgtgagtactgctgtagcctggtatcaacaaaaaccagggcaatctcctaaactactgatttactgggcatccacccggcacactggagtccctgatcgcttcacaggcagtggatctgggacagattatactctcaccatcagcagtgtgcaggctgaagacctggcactttattactgtcagcaacattataccactccgctcacgttcggtgctgggaccaagctggagctgaaacggaccgtggccgcccccagcgtgttcatcttccctcccagcgacgagcagctgaagtctggcaccgccagcgtggtgtgcctgctgaacaacttctacccccgcgaggccaaggtgcagtggaaggtggacaacgccctgcagagcggcaacagccaggagagcgtgaccgagcaggactccaaggacagcacctacagcctgagcagcaccctgaccctgagcaaggccgactacgagaagcacaaggtgtacgcctgcgaggtgacccaccagggactgtctagccccgtgaccaagagcttcaaccggggcgagtgctaa

SEQ ID NO: 771 - DNA, 645 bp, synthetic construct
  misc_feature 1..645: note = 13G4.2F8 light chain DNA sequence
  source 1..645: mol_type = other DNA
gacattgtgatgacccagtctcaaaaattcatgtccacatcagtaggagagagggtcagcatcacctgcaaggccagtcagaatgtaggtactaatgtagcctggtatcagcagaaagcagggcagtctcttgaactgctgatctatggggcatccaaccggcacactggagtccctgatcgcttcacaggcagtggatctgggacagatttcactctcaccatcaccaatgtgcagtctgaagacatgacaaattatttctgtgagcaatatagcaactttcctctcacgttcggtgctgggaccaagctggagctgaaacggaccgtggccgcccccagcgtgttcatcttccctcccagcgacgagcagctgaagtctggcaccgccagcgtggtgtgcctgctgaacaacttctacccccgcgaggccaaggtgcagtggaaggtggacaacgccctgcagagcggcaacagccaggagagcgtgaccgagcaggactccaaggacagcacctacagcctgagcagcaccctgaccctgagcaaggccgactacgagaagcacaaggtgtacgcctgcgaggtgacccaccagggactgtctagccccgtgaccaagagcttcaaccggggcgagtgctaa

SEQ ID NO: 772 - DNA, 660 bp, synthetic construct
  misc_feature 1..660: note = 13H12.2F8 light chain DNA sequence
  source 1..660: mol_type = other DNA
gacgttgttatgacacaaacaccacttacactttctgtaactatcggtcagcctgcctcaatttcatgtaagtcttctcagtccctgtttcatagcgacgggaagacttacctgaattggcttctccaacgaccaggccaatcacccaagcgccttatttatttggtcagtaaattggacagtggagttcccgatagatttaccgggagcggttctgggaccgatttcaccccaaagatctccagggtagaagacgaagatctcggtgtgtactattgctggcaggggacacatttccctctgacattcggtgctggaaccaaacttgagatgaaacggaccgtggccgcccccagcgtgttcatcttccctcccagcgacgagcagctgaagtctggcaccgccagcgtggtgtgcctgctgaacaacttctacccccgcgaggccaaggtgcagtggaaggtggacaacgccctgcagagcggcaacagccaggagagcgtgaccgagcaggactccaaggacagcacctacagcctgagcagcaccctgaccctgagcaaggccgactacgagaagcacaaggtgtacgcctgcgaggtgacccaccagggactgtctagccccgtgaccaagagcttcaaccggggcgagtgctaa

SEQ ID NO: 773 - DNA, 645 bp, synthetic construct
  misc_feature 1..645: note = 15G7.2A7 light chain DNA sequence
  source 1..645: mol_type = other DNA
gacatccagatgaaccagtctccatccagtctgtctgcatccctcggagacacaatttccatcacttgccgtgccagtcagaacattaatatttggttaagctggtaccagcagaaaccaggaaatattcctcaactattgatctataaggcttccaacttgcacacaggcgtcccctcaaggtttagtggcagtggatctggaacagatttcacattaaccatcagcagtctgcagcctgaagacattgccacttactactgtctacagggtcaaagttatcctctcacgttcggtgctgggaccaagctggtgatgaaacggaccgtggccgcccccagcgtgttcatcttccctcccagcgacgagcagctgaagtctggcaccgccagcgtggtgtgcctgctgaacaacttctacccccgcgaggccaaggtgcagtggaaggtggacaacgccctgcagagcggcaacagccaggagagcgtgaccgagcaggactccaaggacagcacctacagcctgagcagcaccctgaccctgagcaaggccgactacgagaagcacaaggtgtacgcctgcgaggtgacccaccagggactgtctagccccgtgaccaagagcttcaaccggggcgagtgctaa

SEQ ID NO: 774 - DNA, 654 bp, synthetic construct
  misc_feature 1..654: note = 19D9.2E5 light chain DNA sequence
  source 1..654: mol_type = other DNA
gatgttgtgatgacccagactccactcactttgtcggttaccattggacaaccagcctccatctcttgtaagtcaagtcagagcctcttacatagtgatggaaagacatatttgaattggttgttacagaggccaggccagcctccaaagcgcctaatgtatctggtgtctacactggactctggagtccctgacaggttcactggcagtggatcagggacagatttcacactgaaaatcagcagagtggaggctgaggatttgggagtttattattgctggcaaggtacacattttcctctcacgttcggtgctgggaccaagccggagcggaccgtggccgcccccagcgtgttcatcttccctcccagcgacgagcagctgaagtctggcaccgccagcgtggtgtgcctgctgaacaacttctacccccgcgaggccaaggtgcagtggaaggtggacaacgccctgcagagcggcaacagccaggagagcgtgaccgagcaggactccaaggacagcacctacagcctgagcagcaccctgaccctgagcaaggccgactacgagaagcacaaggtgtacgcctgcgaggtgacccaccagggactgtctagccccgtgaccaagagcttcaaccggggcgagtgctaa

SEQ ID NO: 775 - DNA, 654 bp, synthetic construct
  misc_feature 1..654: note = 23B10.2B12 light chain DNA sequence
  source 1..654: mol_type = other DNA
gatattgtgatgacgcaggctgcattctccaatccagtcactcttggaacgtcagcttccatctcctgcaggtctagtaagagtctcctacatagtgatggcatcacttatttctattggtatctgcagaggccaggccagtctcctcagctcctgatatatcggatgtccaaccttgcctcaggagtcccagacaggttcagtggcagtgggtcaggaactgatttcacactgagaatcagcagagtggaggctgaggatgtgggtgtttattactgtgctcaaatgctagaattcccgctcacgttcggtgctgggaccaagctggagcggaccgtggccgcccccagcgtgttcatcttccctcccagcgacgagcagctgaagtctggcaccgccagcgtggtgtgcctgctgaacaacttctacccccgcgaggccaaggtgcagtggaaggtggacaacgccctgcagagcggcaacagccaggagagcgtgaccgagcaggactccaaggacagcacctacagcctgagcagcaccctgaccctgagcaaggccgactacgagaagcacaaggtgtacgcctgcgaggtgacccaccagggactgtctagccccgtgaccaagagcttcaaccggggcgagtgctaa

SEQ ID NO: 776 - DNA, 645 bp, synthetic construct
  misc_feature 1..645: note = 24D12.2H9 light chain DNA sequence
  source 1..645: mol_type = other DNA
gacattgtgatgacccagtctcacaaattcatgtccacatcagtaggagacagggtcagcatcacctgcaaggccagtcaggatgtgcgtactgctgtagcctggtatcaacagaaaccagggcaatctcctaaactactgatttactgggcatccacccggcacactggagtccctgatcgcttcacaggcagtggatctgggacagatttcactctcacccttagcaatgtgcagtctgaagacttggcagattatttctgtcagcaatatagtagttatccgtggacgttcggtggaggcaccaagctggaaatcaaacggaccgtggccgcccccagcgtgttcatcttccctcccagcgacgagcagctgaagtctggcaccgccagcgtggtgtgcctgctgaacaacttctacccccgcgaggccaaggtgcagtggaaggtggacaacgccctgcagagcggcaacagccaggagagcgtgaccgagcaggactccaaggacagcacctacagcctgagcagcaccctgaccctgagcaaggccgactacgagaagcacaaggtgtacgcctgcgaggtgacccaccagggactgtctagccccgtgaccaagagcttcaaccggggcgagtgctaa

SEQ ID NO: 777 - DNA, 660 bp, synthetic construct
  misc_feature 1..660: note = F846C.1B2 light chain DNA sequence
  source 1..660: mol_type = other DNA
aacatttggttgacacagtcgccatcatctctggctgtgtctgcaggagaaatggtcactatgacctgtaagtccagtcaaagtgttttatacagttcaaatcagaagaactacttggcctggtaccagcagaaaccagggcagtctcctaaactgctgatctactgggcatccactagggaatctggtgtccctgatcgcttcacaggcagtggatctgggacagacttttctcttaccatcagcagtgtacaagctgaagacctggcagtttattactgtcatcaatatctctcctcgctcacgttcggtgctgggaccaagctggagctgaaacggaccgtggccgcccccagcgtgttcatcttccctcccagcgacgagcagctgaagtctggcaccgccagcgtggtgtgcctgctgaacaacttctacccccgcgaggccaaggtgcagtggaaggtggacaacgccctgcagagcggcaacagccaggagagcgtgaccgagcaggactccaaggacagcacctacagcctgagcagcaccctgaccctgagcaaggccgactacgagaagcacaaggtgtacgcctgcgaggtgacccaccagggactgtctagccccgtgaccaagagcttcaaccggggcgagtgctaa

SEQ ID NO: 778 - DNA, 660 bp, synthetic construct
  misc_feature 1..660: note = F846C.1F5 light chain DNA sequence
  source 1..660: mol_type = other DNA
aacattatgatgacacagtcgccatcatctctggctgtgtctgcaggagaaaaggtcactatgagctgtaagtccagtcaaagtgttttatacagttcaaatcagaagaactacttggcctggtaccagcagaaaccagggcagtctcctaaactgctgatctactgggcatccactagggaatctggtgtccctgatcgcttcacaggcagtggatctgggacagattttactcttaccatcagcagtgtacaacctgaagacctggcagtttattactgtcatcaatacctctcctcgctcacgttcggtgctgggaccaagctggagctgaaacggaccgtggccgcccccagcgtgttcatcttccctcccagcgacgagcagctgaagtctggcaccgccagcgtggtgtgcctgctgaacaacttctacccccgcgaggccaaggtgcagtggaaggtggacaacgccctgcagagcggcaacagccaggagagcgtgaccgagcaggactccaaggacagcacctacagcctgagcagcaccctgaccctgagcaaggccgactacgagaagcacaaggtgtacgcctgcgaggtgacccaccagggactgtctagccccgtgaccaagagcttcaaccggggcgagtgctaa

SEQ ID NO: 779 - DNA, 660 bp, synthetic construct
  misc_feature 1..660: note = F846C.1H12 light chain DNA sequence
  source 1..660: mol_type = other DNA
aacattatgatgacacagtcgccatcatctctggctgtgtctgcaggacaaaaggtcactatgagctgtaagtccagtcaaagtgttttatacagttcaagtcagaagaactacttggcctggtaccagcagaaaccagggcagtctcctaaacttctgatctactgggcatccactagggaatctggtgtccctgatcgcttctcaggcagtggatctgggacagattttactcttaccatcagcagtgtacaacctgaagacctggcagtttattactgtcatcaatacctctcctcgctcacgttcggtgctgggaccaagctggagctgaaacggaccgtggccgcccccagcgtgttcatcttccctcccagcgacgagcagctgaagtctggcaccgccagcgtggtgtgcctgctgaacaacttctacccccgcgaggccaaggtgcagtggaaggtggacaacgccctgcagagcggcaacagccaggagagcgtgaccgagcaggactccaaggacagcacctacagcctgagcagcaccctgaccctgagcaaggccgactacgagaagcacaaggtgtacgcctgcgaggtgacccaccagggactgtctagccccgtgaccaagagcttcaaccggggcgagtgctaa

SEQ ID NO: 780 - DNA, 663 bp, synthetic construct
  misc_feature 1..663: note = F846C.1H5 light chain DNA sequence
  source 1..663: mol_type = other DNA
gatgttgtgatgacccaaactccactctccctgcctgtcagtcttggagatcaagcctccatctcttgcagatctagtcagagccttgtacacaatagtggaaacacctatttacattggtacctgcagaggccaggccagtctccaaacctcctgatctacaaagtttccaaccgattttctggggtcccagacaggttcagtggcagtggatcagggacagatttcacactcaagatcagcagagtggcggctgaggatctgggagtttatttctgctctcaaagtacacatgttcctccgacgttcggtggaggcaccaagctggaaatcaaacggaccgtggccgcccccagcgtgttcatcttccctcccagcgacgagcagctgaagtctggcaccgccagcgtggtgtgcctgctgaacaacttctacccccgcgaggccaaggtgcagtggaaggtggacaacgccctgcagagcggcaacagccaggagagcgtgaccgagcaggactccaaggacagcacctacagcctgagcagcaccctgaccctgagcaaggccgactacgagaagcacaaggtgtacgcctgcgaggtgacccaccagggactgtctagccccgtgaccaagagcttcaaccggggcgagtgctaagga

SEQ ID NO: 781 - DNA, 660 bp, synthetic construct; identical to SEQ ID NO: 778
  misc_feature 1..660: note = F846C.2H3 light chain DNA sequence
  source 1..660: mol_type = other DNA

SEQ ID NO: 782 - DNA, 651 bp, synthetic construct
  misc_feature 1..651: note = F846TC.14A2 light chain DNA sequence
  source 1..651: mol_type = other DNA
caggctgttgtgactcaggaatctgcactcaccacatcacctggtgaaacagtcacactcacttgtcgctcaagtactggggctgttacaactagtaactatgccaactgggtccaagaaaaaccagatcatttattcactggtctaataggtggtatcaataaccgagttccaggtgttcctgccagattctcaggctccctgattggagacaaggcagccctcaccatcacaggggcacagactgaggatgaggcaatatatttctgtgctctatggtatagcaaccattgggtgttcggtggaggaaccaaactgactgtcctacggaccgtggccgcccccagcgtgttcatcttccctcccagcgacgagcagctgaagtctggcaccgccagcgtggtgtgcctgctgaacaacttctacccccgcgaggccaaggtgcagtggaaggtggacaacgccctgcagagcggcaacagccaggagagcgtgaccgagcaggactccaaggacagcacctacagcctgagcagcaccctgaccctgagcaaggccgactacgagaagcacaaggtgtacgcctgcgaggtgacccaccagggactgtctagccccgtgaccaagagcttcaaccggggcgagtgctaa

SEQ ID NO: 783 - DNA, 660 bp, synthetic construct
  misc_feature 1..660: note = F846TC.14E4 light chain DNA sequence
  source 1..660: mol_type = other DNA
gatattgtgatgacgcaggctgcattctccaatccagtcactcttggaacatcagcttccatctcctgcaggtctagtaagagtctcctacatactaatggcatcacttttttgtattggtatctgcagaagccaggccagtctcctcagcccctgatttatcagatgtccaaccttgcctcaggagtcccagacaggttcagtagcagtgggtcaggaactgatttcacactgagaatcagcagagtggaggctgaggatgtgggtgtttattactgtgctcaaaatctagaacttccttggacgttcggtggaggcaccaagctggaaatcaatcggaccgtggccgcccccagcgtgttcatcttccctcccagcgacgagcagctgaagtctggcaccgccagcgtggtgtgcctgctgaacaacttctacccccgcgaggccaaggtgcagtggaaggtggacaacgccctgcagagcggcaacagccaggagagcgtgaccgagcaggactccaaggacagcacctacagcctgagcagcaccctgaccctgagcaaggccgactacgagaagcacaaggtgtacgcctgcgaggtgacccaccagggactgtctagccccgtgaccaagagcttcaaccggggcgagtgctaa

SEQ ID NO: 784 - DNA, 660 bp, synthetic construct
  misc_feature 1..660: note = F846TC.16B5 light chain DNA sequence
  source 1..660: mol_type = other DNA
aacattatgatgacacagtcgccatcatctctggctgtgtctgcaggagaaaaggtcactatgagctgtaagtccagtcaaagtgttttatacagttcaaatcagaagaactacttggcctggtaccagcagaaaccagggcagtctcctaaactactgatctactgggcatccactagggaatctggtgtccctgatcgcttcacaggcagtggatctgggacagattttactcttaccatcagcagtgtacaagctgaagacctggcagtttattactgtcatcaatacctctcctcgctcacgttcggtgctgggaccaagctggagctgaaacggaccgtggccgcccccagcgtgttcatcttccctcccagcgacgagcagctgaagtctggcaccgccagcgtggtgtgcctgctgaacaacttctacccccgcgaggccaaggtgcagtggaaggtggacaacgccctgcagagcggcaacagccaggagagcgtgaccgagcaggactccaaggacagcacctacagcctgagcagcaccctgaccctgagcaaggccgactacgagaagcacaaggtgtacgcctgcgaggtgacccaccagggactgtctagccccgtgaccaagagcttcaaccggggcgagtgctaa

SEQ ID NO: 785 - DNA, 663 bp, synthetic construct
  misc_feature 1..663: note = F846TC.7F10 light chain DNA sequence
  source 1..663: mol_type = other DNA
gacattgtgatgacacagtctccatcctccctggctatgtcagtaggacagaaggtcactatgagctgcaagtccagtcagagccttttaaatagtagcaatcaaaagaactatttggcctggtaccagcagaaaccaggacagtctcctaaacttctggtatactttgcatccactagggaatctggggtccctgatcgcttcataggcagtggatctgggacagatttcactcttaccatcagcagtgtgcaggctgaagacctggcagattacttctgtcagcaacattatagcactccgtacacgttcggagggggggccaagctggaaataaaacggaccgtggccgcccccagcgtgttcatcttccctcccagcgacgagcagctgaagtctggcaccgccagcgtggtgtgcctgctgaacaacttctacccccgcgaggccaaggtgcagtggaaggtggacaacgccctgcagagcggcaacagccaggagagcgtgaccgagcaggactccaaggacagcacctacagcctgagcagcaccctgaccctgagcaaggccgactacgagaagcacaaggtgtacgcctgcgaggtgacccaccagggactgtctagccccgtgaccaagagcttcaaccggggcgagtgctaa

SEQ ID NO: 786 - DNA, 645 bp, synthetic construct
  misc_feature 1..645: note = F847C.10B9 light chain DNA sequence
  source 1..645: mol_type = other DNA
gacatccggatgactcagtctccatccagtctgtctgcatcccttggagacacaattaccatcacttgccatgccagtcagaacattaatgtttggttaagctggtaccagcagaaaccaggaaatattcctaaactattgatctataaggcttccaacttgcacacaggcgtcccatcaaggtttagtggcagtggatctggaacaggtttcacattaaccatcagcagcctgcagcctgaagacattgccacttactactgtcaacagggtcaaagttatccgtacacgttcggaggggggaccaagctggagctgaaacggaccgtggccgcccccagcgtgttcatcttccctcccagcgacgagcagctgaagtctggcaccgccagcgtggtgtgcctgctgaacaacttctacccccgcgaggccaaggtgcagtggaaggtggacaacgccctgcagagcggcaacagccaggagagcgtgaccgagcaggactccaaggacagcacctacagcctgagcagcaccctgaccctgagcaaggccgactacgagaagcacaaggtgtacgcctgcgaggtgacccaccagggactgtctagccccgtgaccaagagcttcaaccggggcgagtgctaa

SEQ ID NO: 787 - DNA, 645 bp, synthetic construct
  misc_feature 1..645: note = F847C.11B1 light chain DNA sequence
  source 1..645: mol_type = other DNA
gaaattgtgttgacccagtctccagcatccctgtccgtgactacaggagaaaaagtcactatcagatgcataaccagcattgatattgatgatgatatgaactggtaccagcagaagccaggggaacctcctaagctccttatttcagaaggcaatactcttcgtcctggagtcccatcccgattctccagcagtggctatggcacagattttgtttttacaattgaaaacacgctctcagaagatgttgcagattactactgtttgcaaagtgataacaagcctctcacgttcggtgctgggaccaagctggagctgaaacggaccgtggccgcccccagcgtgttcatcttccctcccagcgacgagcagctgaagtctggcaccgccagcgtggtgtgcctgctgaacaacttctacccccgcgaggccaaggtgcagtggaaggtggacaacgccctgcagagcggcaacagccaggagagcgtgaccgagcaggactccaaggacagcacctacagcctgagcagcaccctgaccctgagcaaggccgactacgagaagcacaaggtgtacgcctgcgaggtgacccaccagggactgtctagccccgtgaccaagagcttcaaccggggcgagtgctaa

SEQ ID NO: 788 - DNA, 645 bp, synthetic construct
  misc_feature 1..645: note = F847C.12F12 light chain DNA sequence
  source 1..645: mol_type = other DNA
gacatccaggtgattcagtctccatccagtctgtctgcatcccttggagacacaattaccatcacttgccatgccagtcagaacattaatgtttggttaagctggtaccagcagaaaccaggaaatattcctaaactattgatctataaggcttccaacttgcacacaggcgtcccatcaaggtttagtggcagtggatctggaacaggtttcacattaaccatcagcagcctgcagcctgaagacattgccacttactactgtcaacagggtcaaagttatccgtacacgttcggaggggggaccaagctggagctgaaacggaccgtggccgcccccagcgtgttcatcttccctcccagcgacgagcagctgaagtctggcaccgccagcgtggtgtgcctgctgaacaacttctacccccgcgaggccaaggtgcagtggaaggtggacaacgccctgcagagcggcaacagccaggagagcgtgaccgagcaggactccaaggacagcacctacagcctgagcagcaccctgaccctgagcaaggccgactacgagaagcacaaggtgtacgcctgcgaggtgacccaccagggactgtctagccccgtgaccaagagcttcaaccggggcgagtgctaa

SEQ ID NO: 789 - DNA, 646 bp, synthetic construct
  misc_feature 1..646: note = F847C.26F5 light chain DNA sequence
  source 1..646: mol_type = other DNA
gaaattaagatgaaccagtctccatccagtctgtctgcatcccttggagacacaattaccatcacttgccatgccagtcagaacattaatgtttggttaagctggtaccagcagaaaccaggaaatattcctaaactattgatctataaggcttccaacttgcacacaggcgtcccatcaaggtttagtggcagtggatctggaacaggtttcacattaaccatcagcagcctacagcctgaagacattgccacttactactgtcaacagggtcaaagttatccgtacacgttcggaggggggaccaagctggagctgaaaaggaccgtggccgcccccagcgtgttcatcttccctcccagcgacgagcagctgaagtctggcaccgccagcgtggtgtgcctgctgaacaacttctacccccgcgaggccaaggtgcagtggaaggtggacaacgccctgcagagcggcaacagccaggagagcgtgaccgagcaggactccaaggacagcacctacagcctgagcagcaccctgaccctgagcaaggccgactacgagaagcacaaggtgtacgcctgcgaggtgacccaccagggactgtctagccccgtgaccaagagcttcaaccggggcgagtgctaag

SEQ ID NO: 790 - DNA, 651 bp, synthetic construct
  misc_feature 1..651: note = F847C.4B10 light chain DNA sequence
  source 1..651: mol_type = other DNA
caggctgttgtgactcaggaatctgcactcaccacatcacctggtgaaacagtcacactcacttgtcgctcaagtactggggctgttacaactagtaactatgccaactgggtccaagaaaaaccagatcatttattcactggtctaataggtggtaccaacaaccgagctccaggtgttcctgccagattctcaggctccctgattggagacaaggctgccctcaccatcacaggggcacagactgaggatgaggcaatatatttctgtgctctatggtacagcaaccatttagtgttcggtggaggaaccaaactgactgtcctaaggaccgtggccgcccccagcgtgttcatcttccctcccagcgacgagcagctgaagtctggcaccgccagcgtggtgtgcctgctgaacaacttctacccccgcgaggccaaggtgcagtggaaggtggacaacgccctgcagagcggcaacagccaggagagcgtgaccgagcaggactccaaggacagcacctacagcctgagcagcaccctgaccctgagcaaggccgactacgagaagcacaaggtgtacgcctgcgaggtgacccaccagggactgtctagccccgtgaccaagagcttcaaccggggcgagtgctaa

SEQ ID NO: 791 - DNA, 660 bp, synthetic construct
  misc_feature 1..660: note = F849C.8D10 light chain DNA sequence
  source 1..660: mol_type = other DNA
gatgttttgatgacccaaactccactctccctgcctgtcagtcttggagatcaagcctccatctcttgcagatctagtcaggacattgtgcatagtagtggaaacacctatttagaatggtacctgcagaaaccaggccagtctctaaagctcctgatttacaaagtttccaaccgattttctggggtcccagacaggttcagtgccagtggatcagggacagatttcacactcaagatcagcagagtggaggctgaggatctgggagtttattactgctttcaaggttcacatgttcctcccacgttcggctcggggacaaagttggaaataaaacggaccgtggccgcccccagcgtgttcatcttccctcccagcgacgagcagctgaagtctggcaccgccagcgtggtgtgcctgctgaacaacttctacccccgcgaggccaaggtgcagtggaaggtggacaacgccctgcagagcggcaacagccaggagagcgtgaccgagcaggactccaaggacagcacctacagcctgagcagcaccctgaccctgagcaaggccgactacgagaagcacaaggtgtacgcctgcgaggtgacccaccagggactgtctagccccgtgaccaagagcttcaaccggggcgagtgctaa

SEQ ID NO: 792 - DNA, 660 bp, synthetic construct
  misc_feature 1..660: note = F849C.8H3 light chain DNA sequence
  source 1..660: mol_type = other DNA
gatattgggatgaggcaggctgcattctccaatccagtcactcttggaacatcagcttccatctcctgcaggtctagtaagagtctcctatatagtaatggcatcacttatttgtattggtttctccagaagccaggccagtctcctcagctcctgatttatcagatgtccaaccttgcctcaggagtcccagacaggttcagtagcagtgggtcaggaactgatttcacactgagaatcagcagagtggaggctgacgatgtgggtgtttattactgtgctcaaaatctagaacttccgtggacgttcggtggaggcaccaagctggaaatcaaacggaccgtggccgcccccagcgtgttcatcttccctcccagcgacgagcagctgaagtctggcaccgccagcgtggtgtgcctgctgaacaacttctacccccgcgaggccaaggtgcagtggaaggtggacaacgccctgcagagcggcaacagccaggagagcgtgaccgagcaggactccaaggacagcacctacagcctgagcagcaccctgaccctgagcaaggccgactacgagaagcacaaggtgtacgcctgcgaggtgacccaccagggactgtctagccccgtgaccaagagcttcaaccggggcgagtgctaa

SEQ ID NO: 793 - DNA, 657 bp, synthetic construct
  misc_feature 1..657: note = 846.2B11 light chain DNA sequence
  source 1..657: mol_type = other DNA
gacattgtgctgacacagtctcctgcttccttaggtgtttctctggggcagagggccaccatctcatgcagggccagcaaaagtgtcagtacatctggctatagttatatgcactggtaccaacagaaaccaggacagccacccaaactcctcatctatcttgcatccatcctagaatctggggtccctgccaggttcagtggcagtgggtctgggacagacttcaccctcaacatccatcctgtggaggaggaggatgctgcaatctattactgtcagcacagtagggagcttcctctcacgttcggtgctgggaccaagctggagctgaaacggaccgtggccgcccccagcgtgttcatcttccctcccagcgacgagcagctgaagtctggcaccgccagcgtggtgtgcctgctgaacaacttctacccccgcgaggccaaggtgcagtggaaggtggacaacgccctgcagagcggcaacagccaggagagcgtgaccgagcaggactccaaggacagcacctacagcctgagcagcaccctgaccctgagcaaggccgactacgagaagcacaaggtgtacgcctgcgaggtgacccaccagggactgtctagccccgtgaccaagagcttcaaccggggcgagtgctaa

SEQ ID NO: 794 - DNA, 657 bp, synthetic construct
  misc_feature 1..657: note = 846.4D5 light chain DNA sequence
  source 1..657: mol_type = other DNA
aacattgtgctgacccaatctccagcttctttggctgtgtctctagggcagagggccaccatatcctgcagagccagtgaaagtgttgatagttatggcaatagttttatgcactggtaccagcagaaaccaggacagccacccaaactcctcatctatcttgcatccaacctagaatctggggtccctgccaggttcagtggcagtgggtctaggacagacttcaccctcaccattgatcctgtggaggctgatgatgctgcaacctattactgtcagcaaaataatgaggatccgtggacgttcggtggaggcaccaagctggaaatcaaacggaccgtggccgcccccagcgtgttcatcttccctcccagcgacgagcagctgaagtctggcaccgccagcgtggtgtgcctgctgaacaacttctacccccgcgaggccaaggtgcagtggaaggtggacaacgccctgcagagcggcaacagccaggagagcgtgaccgagcaggactccaaggacagcacctacagcctgagcagcaccctgaccctgagcaaggccgactacgagaagcacaaggtgtacgcctgcgaggtgacccaccagggactgtctagccccgtgaccaagagcttcaaccggggcgagtgctaa

SEQ ID NO: 795 - DNA, 660 bp, synthetic construct
  misc_feature 1..660: note = 846T.1H2 light chain DNA sequence
  source 1..660: mol_type = other DNA
gatgttgtgatgacccagactccactcactttgtcggttaccattggacaaccagcctctatctcttgcaagtcaagtcagagtctcttatatagtaatggaaaaacctatttgaattggttattacagaggccaggccagtctccaaagcgcctaatctatctggtgtctaaactggactctggagtccctgacaggttcactggcagtggatcaggaacagattttacactgaaaatcagcagagtggaggctgaggatttgggagtttattactgcgtgcaaggtacacattttcctcagacgttcggtggaggcaccaagctggaaataaaaaggaccgtggccgcccccagcgtgttcatcttccctcccagcgacgagcagctgaagtctggcaccgccagcgtggtgtgcctgctgaacaacttctacccccgcgaggccaaggtgcagtggaaggtggacaacgccctgcagagcggcaacagccaggagagcgtgaccgagcaggactccaaggacagcacctacagcctgagcagcaccctgaccctgagcaaggccgactacgagaagcacaaggtgtacgcctgcgaggtgacccaccagggactgtctagccccgtgaccaagagcttcaaccggggcgagtgctaa

SEQ ID NO: 796 - DNA, 651 bp, synthetic construct; identical to SEQ ID NO: 790
  misc_feature 1..651: note = 847.14H4 light chain DNA sequence
  source 1..651: mol_type = other DNA

SEQ ID NO: 797 - DNA, 360 bp, synthetic construct
  misc_feature 1..360: note = 2D10.2B2 VH DNA sequence
  source 1..360: mol_type = other DNA
caggtccagctgcagcagtctggacctgagctggtgaagcctggggcttcagtgaagatatcctgcaaggcttctggctacaccttcactgactactatataaactgggtgaagcagaggcctggacagggacttgagtggattggatggatttatcctggaagcaatgataccaagtacaatgagaagttcaagggcaaggccacattgactgtagacacatcctccagcacggcctacatgcagctcggcagcctgacctctgaggactctgcggtctatttctgtgcgaattacttcggttgtagcgggtggttcttcgatgtctggggcacagggaccacagtcaccgtctcctca

SEQ ID NO: 798 - DNA, 336 bp, synthetic construct
  misc_feature 1..336: note = 2D10.2B2 VL DNA sequence
  source 1..336: mol_type = other DNA
gatattgtgatgacgcaggctgcattctccaatccagtcactcttggaacgtcagcttccatctcctgcaggtctagtaagagtctcctacatagtgatggcatcacttatttgtattggtatctgcagaggccaggccagtctcctcagctcctgatatatcggatgtccaaccttgcctcaggagtcccagacaggttcagtggcagtgggtcaggaactgatttcacactgagaatcagcagagtggaggctgaggatgtgggtgtttattactgtgctcaaatgatagaattcccgctcacgttcggtgctgggaccatcctggagctgaaa

SEQ ID NO: 799 - DNA, 1356 bp, synthetic construct
  misc_feature 1..1356: note = 2D10.2B2 heavy chain DNA sequence
  source 1..1356: mol_type = other DNA
caggtccagctgcagcagtctggacctgagctggtgaagcctggggcttcagtgaagatatcctgcaaggcttctggctacaccttcactgactactatataaactgggtgaagcagaggcctggacagggacttgagtggattggatggatttatcctggaagcaatgataccaagtacaatgagaagttcaagggcaaggccacattgactgtagacacatcctccagcacggcctacatgcagctcggcagcctgacctctgaggactctgcggtctatttctgtgcgaattacttcggttgtagcgggtggttcttcgatgtctggggcacagggaccacagtcaccgtctcctcagctaagactactcctcccagtgtctaccccctggcccccgtgtgcggcgacacaacaggctcctccgtgacactgggctgcctggtgaaaggctacttccccgagcccgtgacactgacatggaactccggctccctgtcctccggcgtgcacacattccccgccgtgctgcagtccgacctgtacacactgtcctcctccgtgacagtgacatcctccacatggccctcccagtccatcacatgcaacgtggcccaccccgcctcctccacaaaagtggacaaaaaaatcgagcccaggggccccacaatcaaaccctgccccccctgcaaatgccccgcccccaacgccgccggcggcccctccgtgttcatcttcccccccaaaatcaaagacgtgctgatgatctccctgtcccccatcgtgacatgcgtggtggtggacgtgtccgaggacgaccccgacgtgcagatctcctggttcgtgaacaacgtggaggtgcacacagcccagacacagacacacagggaggactacaactccacactgagggtggtgtccgccctgcccatccagcaccaggactggatgtccggcaaagagttcaaatgcaaagtgaacaacaaagacctgggcgcccccatcgagaggacaatctccaaacccaaaggctccgtgagggccccccaggtgtacgtgctgcccccccccgaggaggagatgacaaaaaaacaggtgacactgacatgcatggtgacagacttcatgcccgaggacatctacgtggagtggacaaacaacggcaaaacagagctgaactacaaaaacacagagcccgtgctggactccgacggctcctacttcatgtactccaaactgagggtggagaaaaaaaactgggtggagaggaactcctactcctgctccgtggtgcacgagggcctgcacaaccaccacacaacaaaatccttctccaggacacccggcaaatagtaa

SEQ ID NO: 800 - DNA, 663 bp, synthetic construct
  misc_feature 1..663: note = 2D10.2B2 light chain DNA sequence
  source 1..663: mol_type = other DNA
gatattgtgatgacgcaggctgcattctccaatccagtcactcttggaacgtcagcttccatctcctgcaggtctagtaagagtctcctacatagtgatggcatcacttatttgtattggtatctgcagaggccaggccagtctcctcagctcctgatatatcggatgtccaaccttgcctcaggagtcccagacaggttcagtggcagtgggtcaggaactgatttcacactgagaatcagcagagtggaggctgaggatgtgggtgtttattactgtgctcaaatgatagaattcccgctcacgttcggtgctgggaccatcctggagctgaaacgtgctgatgttgcccctactgtgtccatcttccccccctcctccgagcagctgacatccggcggcgcctccgtggtgtgcttcctgaacaacttctaccccaaagacatcaacgtgaaatggaaaatcgacggctccgagaggcagaacggcgtgctgaactcctggacagaccaggactccaaagactccacatactccatgtcctccacactgacactgacaaaagacgagtacgagaggcacaactcctacacatgcgaggccacacacaaaacatccacatcccccatcgtgaaatccttcaacaggaacgagtgctaataa

SEQ ID NO: 801 - protein, 8 aa, synthetic construct
  REGION 1..8: note = VH_CDR2_42
IYPGSQDT

SEQ ID NO: 802 - protein, 13 aa, synthetic construct
  REGION 1..13: note = VH_CDR3_59
ANYFGSSGWFFDV

SEQ ID NO: 803 - protein, 120 aa, synthetic construct
  REGION 1..120: note = VH-79
QFQLQQSGPELVKPGASVKISCKASGYTFTDYYINWVKQRPGQGLEWIGWIYPGSNDTKYNEKFKGKATLTVDTSSSTAYMQLGSLTSEDSAVYFCANYFGCSGWFFDVWGTGTTVTVSS

SEQ ID NO: 804 - protein, 446 aa, synthetic construct
  REGION 1..446: note = 2D10-VH0-VL0 heavy chain peptide sequence
QFQLQQSGPELVKPGASVKISCKASGYTFTDYYINWVKQRPGQGLEWIGWIYPGSNDTKYNEKFKGKATLTVDTSSSTAYMQLGSLTSEDSAVYFCANYFGCSGWFFDVWGTGTTVTVSSASTKGPSVFPLAPCSRSTSESTAALGCLVKDYFPEPVTVSWNSGALTSGVHTFPAVLQSSGLYSLSSVVTVPSSSLGTKTYTCNVDHKPSNTKVDKRVESKYGPPCPPCPAPEFLGGPSVFLFPPKPKDTLMISRTPEVTCVVVDVSQEDPEVQFNWYVDGVEVHNAKTKPREEQFNSTYRVVSVLTVLHQDWLNGKEYKCKVSNKGLPSSIEKTISKAKGQPREPQVYTLPPSQEEMTKNQVSLTCLVKGFYPSDIAVEWESNGQPENNYKTTPPVLDSDGSFFLYSRLTVDKSRWQEGNVFSCSVMHEALHNHYTQKSLSLSLG

SEQ ID NO: 805 - protein, 219 aa, synthetic construct
  REGION 1..219: note = 2D10-VH0-VL0 light chain peptide sequence
DIVMTQAAFSNPVTLGTSASISCRSSKSLLHSDGITYLYWYLQRPGQSPQLLIYRMSNLASGVPDRFSGSGSGTDFTLRISRVEAEDVGVYYCAQMIEFPLTFGAGTILELKRTVAAPSVFIFPPSDEQLKSGTASVVCLLNNFYPREAKVQWKVDNALQSGNSQESVTEQDSKDSTYSLSSTLTLSKADYEKHKVYACEVTHQGLSSPVTKSFNRGEC

SEQ ID NO: 806 - protein, 120 aa, synthetic construct
  REGION 1..120: note = VH-80 Peptide Sequence
QVQLVQSGAEVKKPGASVKVSCKASGYTFTDYYINWVRQAPGQRLEWMGWIYPGSQDTKYNEKFQGRVTLTVDTSASTAYMELSSLRSEDTAVYFCANYFGSSGWFFDVWGQGTMVTVSS

SEQ ID NO: 807 - protein, 120 aa, synthetic construct; identical to SEQ ID NO: 806
  REGION 1..120: note = VH-81 Peptide Sequence

SEQ ID NO: 808 - protein, 120 aa, synthetic construct; identical to SEQ ID NO: 806
  REGION 1..120: note = VH-82 Peptide Sequence

SEQ ID NO: 809 - protein, 120 aa, synthetic construct; identical to SEQ ID NO: 806
  REGION 1..120: note = VH-83 Peptide Sequence

SEQ ID NO: 810 - protein, 120 aa, synthetic construct
  REGION 1..120: note = VH-84 Peptide Sequence
QVQLVQSGAEVKKPGASVKVSCKASGYTFTDYYINWVRQAPGQRLEWMGWIYPGSQDTKYSQKFQGRVTITVDTSASTAYMELSSLRSEDTAVYYCANYFGSSGWFFDVWGQGTMVTVSS

SEQ ID NO: 811 - protein, 120 aa, synthetic construct; identical to SEQ ID NO: 810
  REGION 1..120: note = VH-85 Peptide Sequence

SEQ ID NO: 812 - protein, 120 aa, synthetic construct; identical to SEQ ID NO: 810
  REGION 1..120: note = VH-86 Peptide Sequence

SEQ ID NO: 813 - protein, 120 aa, synthetic construct; identical to SEQ ID NO: 810
  REGION 1..120: note = VH-87 Peptide Sequence

SEQ ID NO: 814 - protein, 116 aa, synthetic construct
  REGION 1..116: note = VH-88 Peptide Sequence
QIQLVQSGSELKKPGASVKVSCKASGYAFTTYGMSWVRQAPGQGLEWMGWVNTYSGVPTYADDFTGRFVFSLETSVSTAYLQISSLKAEDTAVYFCARGPYAMDYWGQGTLVTVSS

SEQ ID NO: 815 - protein, 116 aa, synthetic construct; identical to SEQ ID NO: 814
  REGION 1..116: note = VH-89 Peptide Sequence

SEQ ID NO: 816 - protein, 116 aa, synthetic construct
  REGION 1..116: note = VH-90 Peptide Sequence
QIQLVQSGSELKKPGASVKVSCKASGYAFTTYGMSWVRQAPGQGLEWMGWVNTYSGVPTSADDFTGRFVFSLETSVSTAYLQISSLKAEDTAVYFCARGPYAMDYWGQGTLVTVSS

SEQ ID NO: 817 - protein, 116 aa, synthetic construct
  REGION 1..116: note = VH-91 Peptide Sequence
QVQLVQSGFELKKPGASVKISCKASGYAFTTYGMSWVRQAPGQGLEWMGWVNTYSGVPTYAQAFTGRFVFSLDTSVSTAYLQISSLKAEDTAVYYCARGPYAMDYWGQGTLVTVSS

SEQ ID NO: 818 - protein, 116 aa, synthetic construct; identical to SEQ ID NO: 817
  REGION 1..116: note = VH-92 Peptide Sequence

SEQ ID NO: 819 - protein, 116 aa, synthetic construct
  REGION 1..116: note = VH-93 Peptide Sequence
QVQLVQSGFELKKPGASVKISCKASGYAFTTYGMSWVRQAPGQGLEWMGWVNTYSGVPTSAQAFTGRFVFSLDTSVSTAYLQISSLKAEDTAVYYCARGPYAMDYWGQGTLVTVSS

SEQ ID NO: 820 - protein, 116 aa, synthetic construct; identical to SEQ ID NO: 819
  REGION 1..116: note = VH-94 Peptide Sequence

SEQ ID NO: 821 - protein, 112 aa, synthetic construct
  REGION 1..112: note = VL-78 Peptide Sequence
DIVMTQSPLSLPVTPGEPASISCRSSKSLLHSDGITYLYWYLQKPGQSPQLLIYRMSNRASGVPDRFSGSGSGTDFTLKISRVEAEDVGVYYCAQMIEFPLTFGQGTKLEIK

SEQ ID NO: 822 - protein, 112 aa, synthetic construct
  REGION 1..112: note = VL-79 Peptide Sequence
DIVMTQSPLSLPVTPGEPASISCRSSKSLLHSDGITYLYWYLQKPGQSPQLLIYRMSNLASGVPDRFSGSGSGTDFTLKISRVEAEDVGVYYCAQMIEFPLTFGQGTKLEIK

SEQ ID NO: 823 - protein, 112 aa, synthetic construct
  REGION 1..112: note = VL-80 Peptide Sequence
DVVMTQSPLSLPVTLGQPASISCRSSKSLLHSDGITYLYWYQQRPGQSPRLLIYRMSNRDSGVPDRFSGSGSGTDFTLKISRVEAEDVGVYYCAQMIEFPLTFGQGTKLEIK

SEQ ID NO: 824 - protein, 112 aa, synthetic construct
  REGION 1..112: note = VL-81 Peptide Sequence
DIVMTQSPLSLPVTLGQPASISCRSSKSLLHSDGITYLYWYQQRPGQSPQLLIYRMSNLDSGVPDRFSGSGSGTDFTLKISRVEAEDVGVYYCAQMIEFPLTFGQGTKLEIK

SEQ ID NO: 825 - protein, 112 aa, synthetic construct; identical to SEQ ID NO: 821
  REGION 1..112: note = VL-82 Peptide Sequence

SEQ ID NO: 826 - protein, 112 aa, synthetic construct; identical to SEQ ID NO: 822
  REGION 1..112: note = VL-83 Peptide Sequence

SEQ ID NO: 827 - protein, 112 aa, synthetic construct; identical to SEQ ID NO: 823
  REGION 1..112: note = VL-84 Peptide Sequence

SEQ ID NO: 828 - protein, 112 aa, synthetic construct; identical to SEQ ID NO: 824
  REGION 1..112: note = VL-85 Peptide Sequence

SEQ ID NO: 829 - protein, 107 aa, synthetic construct
  REGION 1..107: note = VL-86 Peptide Sequence
DIQMTQSPSSLSASVGDRVTITCQASQDISNYLNWYQQKPGKAPKLLIYYTSSLLTGVPSRFSGSGSGTDYTFTISSLQPEDIATYYCQQYSKLPYTFGQGTKLEIK

SEQ ID NO: 830 - protein, 107 aa, synthetic construct
  REGION 1..107: note = VL-87 Peptide Sequence
DIQMTQSPSSLSASVGDRVTITCRASQDISNYLNWYQQKPGKAPKLLIYYTSSLLSGVPSRFSGSGSGTDYTLTISSLQPEDFATYYCQQYSKLPYTFGQGTKLEIK

SEQ ID NO: 831 - protein, 107 aa, synthetic construct; identical to SEQ ID NO: 829
  REGION 1..107: note = VL-88 Peptide Sequence

SEQ ID NO: 832 - protein, 107 aa, synthetic construct; identical to SEQ ID NO: 829
  REGION 1..107: note = VL-89 Peptide Sequence

SEQ ID NO: 833 - protein, 107 aa, synthetic construct; identical to SEQ ID NO: 830
  REGION 1..107: note = VL-90 Peptide Sequence

SEQ ID NO: 834 - protein, 107 aa, synthetic construct; identical to SEQ ID NO: 829
  REGION 1..107: note = VL-91 Peptide Sequence

SEQ ID NO: 835 - protein, 107 aa, synthetic construct; identical to SEQ ID NO: 830
  REGION 1..107: note = VL-92 Peptide Sequence

SEQ ID NO: 836 - protein, 446 aa, synthetic construct
  REGION 1..446: note = 2D10-hVH4-HVL1 heavy chain peptide sequence
QVQLVQSGAEVKKPGASVKVSCKASGYTFTDYYINWVRQAPGQRLEWMGWIYPGSQDTKYNEKFQGRVTLTVDTSASTAYMELSSLRSEDTAVYFCANYFGSSGWFFDVWGQGTMVTVSSASTKGPSVFPLAPCSRSTSESTAALGCLVKDYFPEPVTVSWNSGALTSGVHTFPAVLQSSGLYSLSSVVTVPSSSLGTKTYTCNVDHKPSNTKVDKRVESKYGPPCPPCPAPEFLGGPSVFLFPPKPKDTLMISRTPEVTCVVVDVSQEDPEVQFNWYVDGVEVHNAKTKPREEQFNSTYRVVSVLTVLHQDWLNGKEYKCKVSNKGLPSSIEKTISKAKGQPREPQVYTLPPSQEEMTKNQVSLTCLVKGFYPSDIAVEWESNGQPENNYKTTPPVLDSDGSFFLYSRLTVDKSRWQEGNVFSCSVMHEALHNHYTQKSLSLSLG

SEQ ID NO: 837 - protein, 446 aa, synthetic construct; identical to SEQ ID NO: 836
  REGION 1..446: note = 2D10-hVH4-HVL2 heavy chain peptide sequence

SEQ ID NO: 838 - protein, 446 aa, synthetic construct; identical to SEQ ID NO: 836
  REGION 1..446: note = 2D10-hVH4-HVL3 heavy chain peptide sequence

SEQ ID NO: 839 - protein, 446 aa, synthetic construct; identical to SEQ ID NO: 836
  REGION 1..446: note = 2D10-hVH4-HVL4 heavy chain peptide sequence

SEQ ID NO: 840 - protein, 446 aa, synthetic construct
  REGION 1..446: note = 2D10-hVH3-HVL1 heavy chain peptide sequence
QVQLVQSGAEVKKPGASVKVSCKASGYTFTDYYINWVRQAPGQRLEWMGWIYPGSQDTKYSQKFQGRVTITVDTSASTAYMELSSLRSEDTAVYYCANYFGSSGWFFDVWGQGTMVTVSSASTKGPSVFPLAPCSRSTSESTAALGCLVKDYFPEPVTVSWNSGALTSGVHTFPAVLQSSGLYSLSSVVTVPSSSLGTKTYTCNVDHKPSNTKVDKRVESKYGPPCPPCPAPEFLGGPSVFLFPPKPKDTLMISRTPEVTCVVVDVSQEDPEVQFNWYVDGVEVHNAKTKPREEQFNSTYRVVSVLTVLHQDWLNGKEYKCKVSNKGLPSSIEKTISKAKGQPREPQVYTLPPSQEEMTKNQVSLTCLVKGFYPSDIAVEWESNGQPENNYKTTPPVLDSDGSFFLYSRLTVDKSRWQEGNVFSCSVMHEALHNHYTQKSLSLSLG

SEQ ID NO: 841 - protein, 446 aa, synthetic construct; identical to SEQ ID NO: 840
  REGION 1..446: note = 2D10-hVH3-HVL2 heavy chain peptide sequence

SEQ ID NO: 842 - protein, 446 aa, synthetic construct; identical to SEQ ID NO: 840
  REGION 1..446: note = 2D10-hVH3-HVL3 heavy chain peptide sequence

SEQ ID NO: 843 - protein, 446 aa, synthetic construct; identical to SEQ ID NO: 840
  REGION 1..446: note = 2D10-hVH3-HVL4 heavy chain peptide sequence

SEQ ID NO: 844 - protein, 442 aa, synthetic construct
  REGION 1..442: note = 20H5.A3-VH3VL1 heavy chain peptide sequence
QIQLVQSGSELKKPGASVKVSCKASGYAFTTYGMSWVRQAPGQGLEWMGWVNTYSGVPTYADDFTGRFVFSLETSVSTAYLQISSLKAEDTAVYFCARGPYAMDYWGQGTLVTVSSASTKGPSVFPLAPCSRSTSESTAALGCLVKDYFPEPVTVSWNSGALTSGVHTFPAVLQSSGLYSLSSVVTVPSSSLGTKTYTCNVDHKPSNTKVDKRVESKYGPPCPPCPAPEFLGGPSVFLFPPKPKDTLMISRTPEVTCVVVDVSQEDPEVQFNWYVDGVEVHNAKTKPREEQFNSTYRVVSVLTVLHQDWLNGKEYKCKVSNKGLPSSIEKTISKAKGQPREPQVYTLPPSQEEMTKNQVSLTCLVKGFYPSDIAVEWESNGQPENNYKTTPPVLDSDGSFFLYSRLTVDKSRWQEGNVFSCSVMHEALHNHYTQKSLSLSLG

SEQ ID NO: 845 - protein, 442 aa, synthetic construct; identical to SEQ ID NO: 844
  REGION 1..442: note = 20H5.A3-VH3VL3 heavy chain peptide sequence

SEQ ID NO: 846 - protein, 442 aa, synthetic construct
  REGION 1..442: note = 20H5.A3-VH4VL1 heavy chain peptide sequence
QIQLVQSGSELKKPGASVKVSCKASGYAFTTYGMSWVRQAPGQGLEWMGWVNTYSGVPTSADDFTGRFVFSLETSVSTAYLQISSLKAEDTAVYFCARGPYAMDYWGQGTLVTVSSASTKGPSVFPLAPCSRSTSESTAALGCLVKDYFPEPVTVSWNSGALTSGVHTFPAVLQSSGLYSLSSVVTVPSSSLGTKTYTCNVDHKPSNTKVDKRVESKYGPPCPPCPAPEFLGGPSVFLFPPKPKDTLMISRTPEVTCVVVDVSQEDPEVQFNWYVDGVEVHNAKTKPREEQFNSTYRVVSVLTVLHQDWLNGKEYKCKVSNKGLPSSIEKTISKAKGQPREPQVYTLPPSQEEMTKNQVSLTCLVKGFYPSDIAVEWESNGQPENNYKTTPPVLDSDGSFFLYSRLTVDKSRWQEGNVFSCSVMHEALHNHYTQKSLSLSLG

SEQ ID NO: 847 - protein, 442 aa, synthetic construct
  REGION 1..442: note = 20H5.A3-VH5VL1 heavy chain peptide sequence
QVQLVQSGFELKKPGASVKISCKASGYAFTTYGMSWVRQAPGQGLEWMGWVNTYSGVPTYAQAFTGRFVFSLDTSVSTAYLQISSLKAEDTAVYYCARGPYAMDYWGQGTLVTVSSASTKGPSVFPLAPCSRSTSESTAALGCLVKDYFPEPVTVSWNSGALTSGVHTFPAVLQSSGLYSLSSVVTVPSSSLGTKTYTCNVDHKPSNTKVDKRVESKYGPPCPPCPAPEFLGGPSVFLFPPKPKDTLMISRTPEVTCVVVDVSQEDPEVQFNWYVDGVEVHNAKTKPREEQFNSTYRVVSVLTVLHQDWLNGKEYKCKVSNKGLPSSIEKTISKAKGQPREPQVYTLPPSQEEMTKNQVSLTCLVKGFYPSDIAVEWESNGQPENNYKTTPPVLDSDGSFFLYSRLTVDKSRWQEGNVFSCSVMHEALHNHYTQKSLSLSLG

SEQ ID NO: 848 - protein, 442 aa, synthetic construct; identical to SEQ ID NO: 847
  REGION 1..442: note = 20H5.A3-VH5VL3 heavy chain peptide sequence

SEQ ID NO: 849 - protein, 442 aa, synthetic construct
  REGION 1..442: note = 20H5.A3-VH6VL1 heavy chain peptide sequence
QVQLVQSGFELKKPGASVKISCKASGYAFTTYGMSWVRQAPGQGLEWMGWVNTYSGVPTSAQAFTGRFVFSLDTSVSTAYLQISSLKAEDTAVYYCARGPYAMDYWGQGTLVTVSSASTKGPSVFPLAPCSRSTSESTAALGCLVKDYFPEPVTVSWNSGALTSGVHTFPAVLQSSGLYSLSSVVTVPSSSLGTKTYTCNVDHKPSNTKVDKRVESKYGPPCPPCPAPEFLGGPSVFLFPPKPKDTLMISRTPEVTCVVVDVSQEDPEVQFNWYVDGVEVHNAKTKPREEQFNSTYRVVSVLTVLHQDWLNGKEYKCKVSNKGLPSSIEKTISKAKGQPREPQVYTLPPSQEEMTKNQVSLTCLVKGFYPSDIAVEWESNGQPENNYKTTPPVLDSDGSFFLYSRLTVDKSRWQEGNVFSCSVMHEALHNHYTQKSLSLSLG

SEQ ID NO: 850 - protein, 442 aa, synthetic construct; identical to SEQ ID NO: 849
  REGION 1..442: note = 20H5.A3-VH6VL3 heavy chain peptide sequence

SEQ ID NO: 851 - protein, 219 aa, synthetic construct
  REGION 1..219: note = 2D10-hVH4-HVL1 light chain peptide sequence
DIVMTQSPLSLPVTPGEPASISCRSSKSLLHSDGITYLYWYLQKPGQSPQLLIYRMSNRASGVPDRFSGSGSGTDFTLKISRVEAEDVGVYYCAQMIEFPLTFGQGTKLEIKRTVAAPSVFIFPPSDEQLKSGTASVVCLLNNFYPREAKVQWKVDNALQSGNSQESVTEQDSKDSTYSLSSTLTLSKADYEKHKVYACEVTHQGLSSPVTKSFNRGEC

SEQ ID NO: 852 - protein, 219 aa, synthetic construct
  REGION 1..219: note = 2D10-hVH4-HVL2 light chain peptide sequence
DIVMTQSPLSLPVTPGEPASISCRSSKSLLHSDGITYLYWYLQKPGQSPQLLIYRMSNLASGVPDRFSGSGSGTDFTLKISRVEAEDVGVYYCAQMIEFPLTFGQGTKLEIKRTVAAPSVFIFPPSDEQLKSGTASVVCLLNNFYPREAKVQWKVDNALQSGNSQESVTEQDSKDSTYSLSSTLTLSKADYEKHKVYACEVTHQGLSSPVTKSFNRGEC

SEQ ID NO: 853 - protein, 219 aa, synthetic construct
  REGION 1..219: note = 2D10-hVH4-HVL3 light chain peptide sequence
DVVMTQSPLSLPVTLGQPASISCRSSKSLLHSDGITYLYWYQQRPGQSPRLLIYRMSNRDSGVPDRFSGSGSGTDFTLKISRVEAEDVGVYYCAQMIEFPLTFGQGTKLEIKRTVAAPSVFIFPPSDEQLKSGTASVVCLLNNFYPREAKVQWKVDNALQSGNSQESVTEQDSKDSTYSLSSTLTLSKADYEKHKVYACEVTHQGLSSPVTKSFNRGEC

SEQ ID NO: 854 - protein, 219 aa, synthetic construct
  REGION 1..219: note = 2D10-hVH4-HVL4 light chain peptide sequence
DIVMTQSPLSLPVTLGQPASISCRSSKSLLHSDGITYLYWYQQRPGQSPQLLIYRMSNLDSGVPDRFSGSGSGTDFTLKISRVEAEDVGVYYCAQMIEFPLTFGQGTKLEIKRTVAAPSVFIFPPSDEQLKSGTASVVCLLNNFYPREAKVQWKVDNALQSGNSQESVTEQDSKDSTYSLSSTLTLSKADYEKHKVYACEVTHQGLSSPVTKSFNRGEC

SEQ ID NO: 855 - protein, 219 aa, synthetic construct; identical to SEQ ID NO: 851
  REGION 1..219: note = 2D10-hVH3-HVL1 light chain peptide sequence

SEQ ID NO: 856 - protein, 219 aa, synthetic construct; identical to SEQ ID NO: 852
  REGION 1..219: note = 2D10-hVH3-HVL2 light chain peptide sequence

SEQ ID NO: 857 - protein, 219 aa, synthetic construct; identical to SEQ ID NO: 853
  REGION 1..219: note = 2D10-hVH3-HVL3 light chain peptide sequence

SEQ ID NO: 858 - protein, 219 aa, synthetic construct; identical to SEQ ID NO: 854
  REGION 1..219: note = 2D10-hVH3-HVL4 light chain peptide sequence

SEQ ID NO: 859 - protein, 214 aa, synthetic construct
  REGION 1..214: note = 20H5.A3-VH3VL1 light chain peptide sequence
DIQMTQSPSSLSASVGDRVTITCQASQDISNYLNWYQQKPGKAPKLLIYYTSSLLTGVPSRFSGSGSGTDYTFTISSLQPEDIATYYCQQYSKLPYTFGQGTKLEIKRTVAAPSVFIFPPSDEQLKSGTASVVCLLNNFYPREAKVQWKVDNALQSGNSQESVTEQDSKDSTYSLSSTLTLSKADYEKHKVYACEVTHQGLSSPVTKSFNRGEC

SEQ ID NO: 860 - protein, 214 aa, synthetic construct
  REGION 1..214: note = 20H5.A3-VH3VL3 light chain peptide sequence
DIQMTQSPSSLSASVGDRVTITCRASQDISNYLNWYQQKPGKAPKLLIYYTSSLLSGVPSRFSGSGSGTDYTLTISSLQPEDFATYYCQQYSKLPYTFGQGTKLEIKRTVAAPSVFIFPPSDEQLKSGTASVVCLLNNFYPREAKVQWKVDNALQSGNSQESVTEQDSKDSTYSLSSTLTLSKADYEKHKVYACEVTHQGLSSPVTKSFNRGEC

SEQ ID NO: 861 - protein, 214 aa, synthetic construct; identical to SEQ ID NO: 859
  REGION 1..214: note = 20H5.A3-VH4VL1 light chain peptide sequence

SEQ ID NO: 862 - protein, 214 aa, synthetic construct; identical to SEQ ID NO: 859
  REGION 1..214: note = 20H5.A3-VH5VL1 light chain peptide sequence

SEQ ID NO: 863 - protein, 214 aa, synthetic construct; identical to SEQ ID NO: 860
  REGION 1..214: note = 20H5.A3-VH5VL3 light chain peptide sequence

SEQ ID NO: 864 - protein, 214 aa, synthetic construct; identical to SEQ ID NO: 859
  REGION 1..214: note = 20H5.A3-VH6VL1 light chain peptide sequence

SEQ ID NO: 865 - protein, 214 aa, synthetic construct; identical to SEQ ID NO: 860
  REGION 1..214: note = 20H5.A3-VH6VL3 light chain peptide sequence

SEQ ID NO: 866 - DNA, 360 bp, synthetic construct
  misc_feature 1..360: note = 2D10-hVH4-HVL1 VH DNA sequence
  source 1..360: mol_type = other DNA
caggtacagttggttcaatctggggctgaggtgaaaaagccaggggcctccgttaaggtaagctgcaaggcaagcggctacacatttacagactattatatcaactgggtgaggcaagctcctggccagcggcttgagtggatggggtggatctatccggggagtcaagacaccaaatataatgagaagttccagggacgggtgacccttacagtagacacgtctgcaagcactgcctacatggagttgtcatccctccgctctgaagatactgccgtctacttttgcgctaattacttcggaagcagcgggtggttcttcgacgtttggggccagggaactatggtcacagtgtcatca

SEQ ID NO: 867 - DNA, 360 bp, synthetic construct; identical to SEQ ID NO: 866
  misc_feature 1..360: note = 2D10-hVH4-HVL2 VH DNA sequence
  source 1..360: mol_type = other DNA

SEQ ID NO: 868 - DNA, 360 bp, synthetic construct; identical to SEQ ID NO: 866
  misc_feature 1..360: note = 2D10-hVH4-HVL3 VH DNA sequence
  source 1..360: mol_type = other DNA

SEQ ID NO: 869 - DNA, 360 bp, synthetic construct; identical to SEQ ID NO: 866
  misc_feature 1..360: note = 2D10-hVH4-HVL4 VH DNA sequence
  source 1..360: mol_type = other DNA

SEQ ID NO: 870 - DNA, 360 bp, synthetic construct
  misc_feature 1..360: note = 2D10-hVH3-HVL1 VH DNA sequence
  source 1..360: mol_type = other DNA
caagtccagctggttcagtctggtgcggaggtcaagaagccaggggcaagcgtgaaagtctcctgtaaggcaagtggatatactttcacggattactatattaactgggtcagacaggcaccaggtcaacgcctcgaatggatgggctggatatacccaggtagccaagataccaagtactcccagaaatttcagggcagggtgaccattactgtggatacttccgcttctaccgcctacatggaactcagtagcctgcgttcagaggacaccgccgtgtactattgcgctaactatttcggatcctccggatggttcttcgatgtgtggggccaggggacgatggtgacagttagctcc

SEQ ID NO: 871 - DNA, 360 bp, synthetic construct; identical to SEQ ID NO: 870
  misc_feature 1..360: note = 2D10-hVH3-HVL2 VH DNA sequence
  source 1..360: mol_type = other DNA

SEQ ID NO: 872 - DNA, 360 bp, synthetic construct; identical to SEQ ID NO: 870
  misc_feature 1..360: note = 2D10-hVH3-HVL3 VH DNA sequence
  source 1..360: mol_type = other DNA

SEQ ID NO: 873 - DNA, 360 bp, synthetic construct; identical to SEQ ID NO: 870
  misc_feature 1..360: note = 2D10-hVH3-HVL4 VH DNA sequence
  source 1..360: mol_type = other DNA

SEQ ID NO: 874 - DNA, 348 bp, synthetic construct
  misc_feature 1..348: note = 20H5.A3-VH3VL1 VH DNA sequence
  source 1..348: mol_type = other DNA
caaatccagcttgttcagagtggatcagaactcaagaagcccggagcatccgtgaaagtgtcatgcaaggccagtggctacgcttttactacatatgggatgtcttgggttcggcaggcccccggccagggactagagtggatgggctgggttaacacctatagcggagtgcctacgtacgccgatgattttacaggcaggttcgtattttctctcgaaacgtccgtcagtaccgcctacctccaaattagctctctgaaagcagaggacaccgcagtctacttttgcgccagaggtccgtatgctatggattattggggacagggcaccctggtgacagtatcctcc

SEQ ID NO: 875 - DNA, 348 bp, synthetic construct; identical to SEQ ID NO: 874
  misc_feature 1..348: note = 20H5.A3-VH3VL3 VH DNA sequence
  source 1..348: mol_type = other DNA

SEQ ID NO: 876 - DNA, 348 bp, synthetic construct
  misc_feature 1..348: note = 20H5.A3-VH4VL1 VH DNA sequence
  source 1..348: mol_type = other DNA
caaatccagttggtgcagagtggttctgagctgaagaaacctggtgcttcagttaaggtctcttgcaaagcatccggttatgcatttactacctacggaatgtcttgggtaaggcaagctcccggacagggtctcgagtggatggggtgggtgaacacctattccggcgtgcctacgtcagccgacgactttactgggcgttttgtatttagtctagagacgtctgtttcaaccgcctacctgcagatctctagcctgaaagctgaagatacagccgtatatttctgtgcccggggaccatacgccatggactactggggccaagggactctggtgaccgtttctagc

SEQ ID NO: 877 - DNA, 348 bp, synthetic construct
  misc_feature 1..348: note = 20H5.A3-VH5VL1 VH DNA sequence
  source 1..348: mol_type = other DNA
caagtgcaactggtgcagagcggctttgagctgaaaaagcccggcgcctctgtgaagatcagttgcaaagcttccggctacgcctttaccacctatggtatgtcttgggttagacaggctccaggacagggcctggagtggatgggttgggtcaatacctactctggagtgccaacctatgctcaggcattcacaggccggtttgtcttcagtctcgataccagcgtgtcaaccgcatacctgcagatcagctctcttaaagccgaggataccgctgtctactactgtgccagaggaccttatgccatggattactgggggcaaggcaccctcgtcacagtgtcttct

SEQ ID NO: 878 - DNA, 348 bp, synthetic construct; identical to SEQ ID NO: 877
  misc_feature 1..348: note = 20H5.A3-VH5VL3 VH DNA sequence
  source 1..348: mol_type = other DNA

SEQ ID NO: 879 - DNA, 348 bp, synthetic construct
  misc_feature 1..348: note = 20H5.A3-VH6VL1 VH DNA sequence
  source 1..348: mol_type = other DNA
caggttcagcttgtccaatcaggctttgagctgaagaagcctggagctagcgtcaagattagttgtaaggcctcaggctacgctttcaccacctacggaatgtcctgggtgcggcaagccccaggccagggcctggagtggatgggatgggtgaatacgtacagtggcgtccccactagcgcccaggcttttactggaagattcgtgttctctcttgatacctccgtatcaaccgcttacctgcagataagttcactcaaggctgaggataccgccgtgtattattgtgcccgagggccctacgctatggattactggggacagggcacactcgtaacagtgagctct

SEQ ID NO: 880 - DNA, 348 bp, synthetic construct; identical to SEQ ID NO: 879
  misc_feature 1..348: note = 20H5.A3-VH6VL3 VH DNA sequence
  source 1..348: mol_type = other DNA

SEQ ID NO: 881 - DNA, 336 bp, synthetic construct
  misc_feature 1..336: note = 2D10-hVH4-HVL1 VL DNA sequence
  source 1..336: mol_type = other DNA
gacatcgtgatgacccagtctcccttatccctgccagtgacaccaggagaaccagccagcatttcttgccggtctagcaaatctctgctccactctgacggaatcacgtatctgtactggtatctccaaaagcctgggcagtccccacagctgctcatttatcgaatgagtaaccgtgcatctggagtgcccgacagattttcaggctctggcagtgggactgactttacactgaagattagcagagtcgaggctgaggatgtgggggtgtattactgtgcccagatgatagaatttcccctgactttcggacaggggactaaacttgagatcaaa

SEQ ID NO: 882 - DNA, 336 bp, synthetic construct
  misc_feature 1..336: note = 2D10-hVH4-HVL2 VL DNA sequence
  source 1..336: mol_type = other DNA
gatatcgtgatgacccaaagcccactgtctttgcctgttacaccgggcgaaccagcttccatcagttgtcgctccagtaagtcacttctccacagtgacggcatcacatacctgtattggtacctccagaagccaggccaatccccccaactgttgatttatagaatgtccaatctggcatccggagtgcctgaccgcttctccggctctggatctgggacagactttactctgaagatcagcagagtggaggcggaagatgtgggggtctactattgcgctcaaatgatcgagttccctctgacttttggacagggaacgaagctcgaaattaag

SEQ ID NO: 883 - DNA, 336 bp, synthetic construct
  misc_feature 1..336: note = 2D10-hVH4-HVL3 VL DNA sequence
  source 1..336: mol_type = other DNA
gatgtggtgatgactcaaagcccacttagcctgccagttactcttggacagccagccagtatttcttgccggagttccaagagcctgttgcacagcgacgggatcacatatttatactggtaccaacagagacctgggcagtccccgcgcttgctgatctacaggatgtctaacagagactcaggggtccccgacagatttagtggctctggaagcgggacagatttcacactgaagatctcaagggtcgaagccgaggacgtgggcgtgtattactgtgcacagatgatagagttccctcttacattcggccaggggaccaaacttgaaatcaag

SEQ ID NO: 884 - DNA, 336 bp, synthetic construct
  misc_feature 1..336: note = 2D10-hVH4-HVL4 VL DNA sequence
  source 1..336: mol_type = other DNA
gacatagtgatgacccagagcccccttagccttcccgtgacactgggacagccggcgtctatttcttgtaggtcctctaaatctttgttgcacagtgatggaatcacatatctgtactggtaccagcagcggccaggacagagccctcagctgctgatatatcgaatgtcaaacctcgatagcggtgttcctgaccgcttttccggaagcggctccggcaccgactttaccttaaagatctctcgggttgaggccgaggacgtgggagtctactactgcgctcagatgatcgaatttcctctcacgttcggacaaggtacaaagttagagatcaag

SEQ ID NO: 885 - DNA, 336 bp, synthetic construct; identical to SEQ ID NO: 881
  misc_feature 1..336: note = 2D10-hVH3-HVL1 VL DNA sequence
  source 1..336: mol_type = other DNA

SEQ ID NO: 886 - DNA, 336 bp, synthetic construct; identical to SEQ ID NO: 882
  misc_feature 1..336: note = 2D10-hVH3-HVL2 VL DNA sequence
  source 1..336: mol_type = other DNA

SEQ ID NO: 887 - DNA, 336 bp, synthetic construct; identical to SEQ ID NO: 883
  misc_feature 1..336: note = 2D10-hVH3-HVL3 VL DNA sequence
  source 1..336: mol_type = other DNA

SEQ ID NO: 888 - DNA, 336 bp, synthetic construct; identical to SEQ ID NO: 884
  misc_feature 1..336: note = 2D10-hVH3-HVL4 VL DNA sequence
  source 1..336: mol_type = other DNA

SEQ ID NO: 889 - DNA, 321 bp, synthetic construct
  misc_feature 1..321: note = 20H5.A3-VH3VL1 VL DNA sequence
  source 1..321: mol_type = other DNA
gacatccagatgactcagtctccaagcagcctgtccgcttcagtcggggaccgagttacaatcacctgtcaggctagccaggacattagcaactatctgaactggtatcagcagaaacccggaaaggcccctaaacttctgatctactatacatcttcactgctgacgggtgtcccctcccggttctctggctccggctccggtaccgactatacctttactatctcatctctacagcccgaagacatcgcaacatattattgtcaacaatattctaagctgccctacactttcggccaaggaacaaagctggagattaag

SEQ ID NO: 890 - DNA, 321 bp, synthetic construct
  misc_feature 1..321: note = 20H5.A3-VH3VL3 VL DNA sequence
  source 1..321: mol_type = other DNA
gacattcagatgacccaatccccttcctccctaagcgccagcgtgggcgaccgcgtaaccatcacctgtcgagccagtcaggacatttcaaactacctgaactggtatcagcaaaaaccaggcaaagcacctaaactgctcatctactacacttccagtttgctttcaggtgtcccaagccgctttagtggatcaggttccggtaccgattacaccctgacgatctctagtctgcagccagaggacttcgctacgtactattgccagcaatatagcaagctgccctacaccttcggccagggcactaagctggaaatcaag

SEQ ID NO: 891 - DNA, 321 bp, synthetic construct; identical to SEQ ID NO: 889
  misc_feature 1..321: note = 20H5.A3-VH4VL1 VL DNA sequence
  source 1..321: mol_type = other DNA

SEQ ID NO: 892 - DNA, 321 bp, synthetic construct; identical to SEQ ID NO: 889
  misc_feature 1..321: note = 20H5.A3-VH5VL1 VL DNA sequence
  source 1..321: mol_type = other DNA

SEQ ID NO: 893 - DNA, 321 bp, synthetic construct; identical to SEQ ID NO: 890
  misc_feature 1..321: note = 20H5.A3-VH5VL3 VL DNA sequence
  source 1..321: mol_type = other DNA

SEQ ID NO: 894 - DNA, 321 bp, synthetic construct; identical to SEQ ID NO: 889
  misc_feature 1..321: note = 20H5.A3-VH6VL1 VL DNA sequence
  source 1..321: mol_type = other DNA

SEQ ID NO: 895 - DNA, 321 bp, synthetic construct; identical to SEQ ID NO: 890
  misc_feature 1..321: note = 20H5.A3-VH6VL3 VL DNA sequence
  source 1..321: mol_type = other DNA

SEQ ID NO: 896 - DNA, 1344 bp, synthetic construct
  misc_feature 1..1344: note = 2D10-hVH4-HVL1 heavy chain DNA sequence
  source 1..1344: mol_type = other DNA
caggtacagttggttcaatctggggctgaggtgaaaaagccaggggcctccgttaaggtaagctgcaaggcaagcggctacacatttacagactattatatcaactgggtgaggcaagctcctggccagcggcttgagtggatggggtggatctatccggggagtcaagacaccaaatataatgagaagttccagggacgggtgacccttacagtagacacgtctgcaagcactgcctacatggagttgtcatccctccgctctgaagatactgccgtctacttttgcgctaattacttcggaagcagcgggtggttcttcgacgtttggggccagggaactatggtcacagtgtcatcagctagcaccaagggccccagcgtgtttcctctcgctccctgcagccggagcacatccgagagcaccgctgctctgggctgtctcgtgaaggactacttccctgaacccgtcaccgtcagctggaatagcggcgccctgacatccggcgtccacacattccccgctgtcctgcagagcagcggcctgtacagcctgagctccgtggtcaccgtgcctagcagcagcctgggaacaaagacctacacctgcaacgtggaccataagccctccaacaccaaggtggacaagcgggtggaatccaagtatggacccccctgtcctccttgccctgctcctgaatttctcggaggcccctccgtcttcctgtttccccccaagcccaaggacaccctgatgatctcccggacacccgaagtcacctgcgtcgtggtggatgtcagccaggaagatcccgaggtgcagttcaactggtacgtggacggagtggaggtgcataacgccaaaaccaagcccagggaagagcagttcaacagcacctatcgggtcgtgtccgtgctcaccgtcctgcatcaggattggctcaacggcaaggagtacaagtgcaaggtgtccaacaagggcctgccctcctccatcgagaagaccatctccaaggctaagggccaacctcgggagccccaagtgtataccctccctcccagccaggaggagatgaccaagaatcaagtgagcctgacctgcctcgtgaagggattttacccctccgacatcgctgtggaatgggaaagcaatggccaacctgagaacaactacaagaccacaccccccgtgctggactccgatggctccttcttcctgtacagcaggctgaccgtggacaaatcccggtggcaagagggaaacgtgttcagctgctccgtgatgcacgaggctctccacaaccactacacccagaagagcctctccctgagcctcggctagtaa

SEQ ID NO: 897 - DNA, 1344 bp, synthetic construct; identical to SEQ ID NO: 896
  misc_feature 1..1344: note = 2D10-hVH4-HVL2 heavy chain DNA sequence
  source 1..1344: mol_type = other DNA

SEQ ID NO: 898 - DNA, 1344 bp, synthetic construct; identical to SEQ ID NO: 896
  misc_feature 1..1344: note = 2D10-hVH4-HVL3 heavy chain DNA sequence
  source 1..1344: mol_type = other DNA

SEQ ID NO: 899 - DNA, 1344 bp, synthetic construct; identical to SEQ ID NO: 896
  misc_feature 1..1344: note = 2D10-hVH4-HVL4 heavy chain DNA sequence
  source 1..1344: mol_type = other DNA

SEQ ID NO: 900 - DNA, 1344 bp, synthetic construct
  misc_feature 1..1344: note = 2D10-hVH3-HVL1 heavy chain DNA sequence
  source 1..1344: mol_type = other DNA
caagtccagctggttcagtctggtgcggaggtcaagaagccaggggcaagcgtgaaagtctcctgtaaggcaagtggatatactttcacggattactatattaactgggtcagacaggcaccaggtcaacgcctcgaatggatgggctggatatacccaggtagccaagataccaagtactcccagaaatttcagggcagggtgaccattactgtggatacttccgcttctaccgcctacatggaactcagtagcctgcgttcagaggacaccgccgtgtactattgcgctaactatttcggatcctccggatggttcttcgatgtgtggggccaggggacgatggtgacagttagctccgctagcaccaagggccccagcgtgtttcctctcgctccctgcagccggagcacatccgagagcaccgctgctctgggctgtctcgtgaaggactacttccctgaacccgtcaccgtcagctggaatagcggcgccctgacatccggcgtccacacattccccgctgtcctgcagagcagcggcctgtacagcctgagctccgtggtcaccgtgcctagcagcagcctgggaacaaagacctacacctgcaacgtggaccataagccctccaacaccaaggtggacaagcgggtggaatccaagtatggacccccctgtcctccttgccctgctcctgaatttctcggaggcccctccgtcttcctgtttccccccaagcccaaggacaccctgatgatctcccggacacccgaagtcacctgcgtcgtggtggatgtcagccaggaagatcccgaggtgcagttcaactggtacgtggacggagtggaggtgcataacgccaaaaccaagcccagggaagagcagttcaacagcacctatcgggtcgtgtccgtgctcaccgtcctgcatcaggattggctcaacggcaaggagtacaagtgcaaggtgtccaacaagggcctgccctcctccatcgagaagaccatctccaaggctaagggccaacctcgggagccccaagtgtataccctccctcccagccaggaggagatgaccaagaatcaagtgagcctgacctgcctcgtgaagggattttacccctccgacatcgctgtggaatgggaaagcaatggccaacctgagaacaactacaagaccacaccccccgtgctggactccgatggctccttcttcctgtacagcaggctgaccgtggacaaatcccggtggcaagagggaaacgtgttcagctgctccgtgatgcacgaggctctccacaaccactacacccagaagagcctctccctgagcctcggctagtaa

SEQ ID NO: 901 - DNA, 1344 bp, synthetic construct; identical to SEQ ID NO: 900
  misc_feature 1..1344: note = 2D10-hVH3-HVL2 heavy chain DNA sequence
  source 1..1344: mol_type = other DNA

SEQ ID NO: 902 - DNA, 1344 bp, synthetic construct; identical to SEQ ID NO: 900
  misc_feature 1..1344: note = 2D10-hVH3-HVL3 heavy chain DNA sequence
  source 1..1344: mol_type = other DNA

SEQ ID NO: 903 - DNA, 1344 bp, synthetic construct; identical to SEQ ID NO: 900
  misc_feature 1..1344: note = 2D10-hVH3-HVL4 heavy chain DNA sequence
  source 1..1344: mol_type = other DNA

SEQ ID NO: 904 - DNA, 1332 bp, synthetic construct
  misc_feature 1..1332: note = 20H5.A3-VH3VL1 heavy chain DNA sequence
  source 1..1332: mol_type = other DNA
caaatccagcttgttcagagtggatcagaactcaagaagcccggagcatccgtgaaagtgtcatgcaaggccagtggctacgcttttactacatatgggatgtcttgggttcggcaggcccccggccagggactagagtggatgggctgggttaacacctatagcggagtgcctacgtacgccgatgattttacaggcaggttcgtattttctctcgaaacgtccgtcagtaccgcctacctccaaattagctctctgaaagcagaggacaccgcagtctacttttgcgccagaggtccgtatgctatggattattggggacagggcaccctggtgacagtatcctccgctagcaccaagggccccagcgtgtttcctctcgctccctgcagccggagcacatccgagagcaccgctgctctgggctgtctcgtgaaggactacttccctgaacccgtcaccgtcagctggaatagcggcgccctgacatccggcgtccacacattccccgctgtcctgcagagcagcggcctgtacagcctgagctccgtggtcaccgtgcctagcagcagcctgggaacaaagacctacacctgcaacgtggaccataagccctccaacaccaaggtggacaagcgggtggaatccaagtatggacccccctgtcctccttgccctgctcctgaatttctcggaggcccctccgtcttcctgtttccccccaagcccaaggacaccctgatgatctcccggacacccgaagtcacctgcgtcgtggtggatgtcagccaggaagatcccgaggtgcagttcaactggtacgtggacggagtggaggtgcataacgccaaaaccaagcccagggaagagcagttcaacagcacctatcgggtcgtgtccgtgctcaccgtcctgcatcaggattggctcaacggcaaggagtacaagtgcaaggtgtccaacaagggcctgccctcctccatcgagaagaccatctccaaggctaagggccaacctcgggagccccaagtgtataccctccctcccagccaggaggagatgaccaagaatcaagtgagcctgacctgcctcgtgaagggattttacccctccgacatcgctgtggaatgggaaagcaatggccaacctgagaacaactacaagaccacaccccccgtgctggactccgatggctccttcttcctgtacagcaggctgaccgtggacaaatcccggtggcaagagggaaacgtgttcagctgctccgtgatgcacgaggctctccacaaccactacacccagaagagcctctccctgagcctcggctagtaa

SEQ ID NO: 905 - DNA, 1332 bp, synthetic construct; identical to SEQ ID NO: 904
  misc_feature 1..1332: note = 20H5.A3-VH3VL3 heavy chain DNA sequence
  source 1..1332: mol_type = other DNA

SEQ ID NO: 906 - DNA, 1331 bp, synthetic construct
  misc_feature 1..1331: note = 20H5.A3-VH4VL1 heavy chain DNA sequence
  source 1..1331: mol_type = other DNA
caaatccagttggtgcagagtggttctgagctgaagaaacctggtgcttcagttaaggtctcttgcaaagcatccggttatgcatttactacctacggaatgtcttgggtaaggcaagctcccggacagggtctcgagtggatggggtgggtgaacacctattccggcgtgcctacgtcagccgacgactttactgggcgttttgtatttagtctagagacgtctgtttcaaccgcctacctgcagatctctagcctgaaagctgaagatacagccgtatatttctgtgcccggggaccatacgccatggactactggggccaagggactctggtgaccgtttctagcgctagcaccaagggccccagcgtgtttcctctcgctccctgcagccggagcacatccgagagcaccgctgctctgggctgtctcgtgaaggactacttccctgaacccgtcaccgtcagctggaatagcggcgccctgacatccggcgtccacacattccccgctgtcctgcagagcagcggcctgtacagcctgagctccgtggtcaccgtgcctagcagcagcctgggaacaaagacctacacctgcaacgtggaccataagccctccaacaccaaggtggacaagcgggtggaatccaagtatggacccccctgtcctccttgccctgctcctgaatttctcggaggcccctccgtcttcctgtttccccccaagcccaaggacaccctgatgatctcccggacacccgaagtcacctgcgtcgtggtggatgtcagccaggaagatcccgaggtgcagttcaactggtacgtggacggagtggaggtgcataacgccaaaaccaagcccagggaagagcagttcaacagcacctatcgggtcgtgtccgtgctcaccgtcctgcatcaggattggctcaacggcaaggagtacaagtgcaaggtgtccaacaagggcctgccctcctccatcgagaagaccatctccaaggctaagggccaacctcgggagccccaagtgtataccctccctcccagccaggaggagatgaccaagaatcaagtgagcctgacctgcctcgtgaagggattttacccctccgacatcgctgtggaatgggaaagcaatggccaacctgagaacaactacaagaccacaccccccgtgctggactccgatggctccttcttcctgtacagcaggctgaccgtggacaaatcccggtggcaagagggaaacgtgttcagctgctccgtgatgcacgaggctctccacaaccactacacccagaagagcctctccctgagcctcggctagta

SEQ ID NO: 907 - DNA, 1332 bp, synthetic construct
  misc_feature 1..1332: note = 20H5.A3-VH5VL1 heavy chain DNA sequence
  source 1..1332: mol_type = other DNA
caagtgcaactggtgcagagcggctttgagctgaaaaagcccggcgcctctgtgaagatcagttgcaaagcttccggctacgcctttaccacctatggtatgtcttgggttagacaggctccaggacagggcctggagtggatgggttgggtcaatacctactctggagtgccaacctatgctcaggcattcacaggccggtttgtcttcagtctcgataccagcgtgtcaaccgcatacctgcagatcagctctcttaaagccgaggataccgctgtctactactgtgccagaggaccttatgccatggattactgggggcaaggcaccctcgtcacagtgtcttctgctagcaccaagggccccagcgtgtttcctctcgctccctgcagccggagcacatccgagagcaccgctgctctgggctgtctcgtgaaggactacttccctgaacccgtcaccgtcagctggaatagcggcgccctgacatccggcgtccacacattccccgctgtcctgcagagcagcggcctgtacagcctgagctccgtggtcaccgtgcctagcagcagcctgggaacaaagacctacacctgcaacgtggaccataagccctccaacaccaaggtggacaagcgggtggaatccaagtatggacccccctgtcctccttgccctgctcctgaatttctcggaggcccctccgtcttcctgtttccccccaagcccaaggacaccctgatgatctcccggacacccgaagtcacctgcgtcgtggtggatgtcagccaggaagatcccgaggtgcagttcaactggtacgtggacggagtggaggtgcataacgccaaaaccaagcccagggaagagcagttcaacagcacctatcgggtcgtgtccgtgctcaccgtcctgcatcaggattggctcaacggcaaggagtacaagtgcaaggtgtccaacaagggcctgccctcctccatcgagaagaccatctccaaggctaagggccaacctcgggagccccaagtgtataccctccctcccagccaggaggagatgaccaagaatcaagtgagcctgacctgcctcgtgaagggattttacccctccgacatcgctgtggaatgggaaagcaatggccaacctgagaacaactacaagaccacaccccccgtgctggactccgatggctccttcttcctgtacagcaggctgaccgtggacaaatcccggtggcaagagggaaacgtgttcagctgctccgtgatgcacgaggctctccacaaccactacacccagaagagcctctccctgagcctcggctagtaa

SEQ ID NO: 908 - DNA, 1332 bp, synthetic construct; identical to SEQ ID NO: 907
  misc_feature 1..1332: note = 20H5.A3-VH5VL3 heavy chain DNA sequence
  source 1..1332: mol_type = other DNA

SEQ ID NO: 909 - DNA, 1332 bp, synthetic construct
  misc_feature 1..1332: note = 20H5.A3-VH6VL1 heavy chain DNA sequence
  source 1..1332: mol_type = other DNA
caggttcagcttgtccaatcaggctttgagctgaagaagcctggagctagcgtcaagattagttgtaaggcctcaggctacgctttcaccacctacggaatgtcctgggtgcggcaagccccaggccagggcctggagtggatgggatgggtgaatacgtacagtggcgtccccactagcgcccaggcttttactggaagattcgtgttctctcttgatacctccgtatcaaccgcttacctgcagataagttcactcaaggctgaggataccgccgtgtattattgtgcccgagggccctacgctatggattactggggacagggcacactcgtaacagtgagctctgctagcaccaagggccccagcgtgtttcctctcgctccctgcagccggagcacatccgagagcaccgctgctctgggctgtctcgtgaaggactacttccctgaacccgtcaccgtcagctggaatagcggcgccctgacatccggcgtccacacattccccgctgtcctgcagagcagcggcctgtacagcctgagctccgtggtcaccgtgcctagcagcagcctgggaacaaagacctacacctgcaacgtggaccataagccctccaacaccaaggtggacaagcgggtggaatccaagtatggacccccctgtcctccttgccctgctcctgaatttctcggaggcccctccgtcttcctgtttccccccaagcccaaggacaccctgatgatctcccggacacccgaagtcacctgcgtcgtggtggatgtcagccaggaagatcccgaggtgcagttcaactggtacgtggacggagtggaggtgcataacgccaaaaccaagcccagggaagagcagttcaacagcacctatcgggtcgtgtccgtgctcaccgtcctgcatcaggattggctcaacggcaaggagtacaagtgcaaggtgtccaacaagggcctgccctcctccatcgagaagaccatctccaaggctaagggccaacctcgggagccccaagtgtataccctccctcccagccaggaggagatgaccaagaatcaagtgagcctgacctgcctcgtgaagggattttacccctccgacatcgctgtggaatgggaaagcaatggccaacctgagaacaactacaagaccacaccccccgtgctggactccgatggctccttcttcctgtacagcaggctgaccgtggacaaatcccggtggcaagagggaaacgtgttcagctgctccgtgatgcacgaggctctccacaaccactacacccagaagagcctctccctgagcctcggctagtaa

SEQ ID NO: 910 - DNA, 1332 bp, synthetic construct; identical to SEQ ID NO: 909
  misc_feature 1..1332: note = 20H5.A3-VH6VL3 heavy chain DNA sequence
  source 1..1332: mol_type = other DNA

SEQ ID NO: 911 - DNA, 660 bp, synthetic construct
  misc_feature 1..660: note = 2D10-hVH4-HVL1 light chain DNA sequence
  source 1..660: mol_type = other DNA
gacatcgtgatgacccagtctcccttatccctgccagtgacaccaggagaaccagccagcatttcttgccggtctagcaaatctctgctccactctgacggaatcacgtatctgtactggtatctccaaaagcctgggcagtccccacagctgctcatttatcgaatgagtaaccgtgcatctggagtgcccgacagattttcaggctctggcagtgggactgactttacactgaagattagcagagtcgaggctgaggatgtgggggtgtattactgtgcccagatgatagaatttcccctgactttcggacaggggactaaacttgagatcaaaaggaccgtggccgcccccagcgtgttcatcttccctcccagcgacgagcagctgaagtctggcaccgccagcgtggtgtgcctgctgaacaacttctacccccgcgaggccaaggtgcagtggaaggtggacaacgccctgcagagcggcaacagccaggagagcgtgaccgagcaggactccaaggacagcacctacagcctgagcagcaccctgaccctgagcaaggccgactacgagaagcacaaggtgtacgcctgcgaggtgacccaccagggactgtctagccccgtgaccaagagcttcaaccggggcgagtgctaa

SEQ ID NO: 912 - DNA, 660 bp, synthetic construct
  misc_feature 1..660: note = 2D10-hVH4-HVL2 light chain DNA sequence
  source 1..660: mol_type = other DNA
gatatcgtgatgacccaaagcccactgtctttgcctgttacaccgggcgaaccagcttccatcagttgtcgctccagtaagtcacttctccacagtgacggcatcacatacctgtattggtacctccagaagccaggccaatccccccaactgttgatttatagaatgtccaatctggcatccggagtgcctgaccgcttctccggctctggatctgggacagactttactctgaagatcagcagagtggaggcggaagatgtgggggtctactattgcgctcaaatgatcgagttccctctgacttttggacagggaacgaagctcgaaattaagaggaccgtggccgcccccagcgtgttcatcttccctcccagcgacgagcagctgaagtctggcaccgccagcgtggtgtgcctgctgaacaacttctacccccgcgaggccaaggtgcagtggaaggtggacaacgccctgcagagcggcaacagccaggagagcgtgaccgagcaggactccaaggacagcacctacagcctgagcagcaccctgaccctgagcaaggccgactacgagaagcacaaggtgtacgcctgcgaggtgacccaccagggactgtctagccccgtgaccaagagcttcaaccggggcgagtgctaa

SEQ ID NO: 913 - DNA, 660 bp, synthetic construct
  misc_feature 1..660: note = 2D10-hVH4-HVL3 light chain DNA sequence
  source 1..660: mol_type = other DNA
gatgtggtgatgactcaaagcccacttagcctgccagttactcttggacagccagccagtatttcttgccggagttccaagagcctgttgcacagcgacgggatcacatatttatactggtaccaacagagacctgggcagtccccgcgcttgctgatctacaggatgtctaacagagactcaggggtccccgacagatttagtggctctggaagcgggacagatttcacactgaagatctcaagggtcgaagccgaggacgtgggcgtgtattactgtgcacagatgatagagttccctcttacattcggccaggggaccaaacttgaaatcaagaggaccgtggccgcccccagcgtgttcatcttccctcccagcgacgagcagctgaagtctggcaccgccagcgtggtgtgcctgctgaacaacttctacccccgcgaggccaaggtgcagtggaaggtggacaacgccctgcagagcggcaacagccaggagagcgtgaccgagcaggactccaaggacagcacctacagcctgagcagcaccctgaccctgagcaaggccgactacgagaagcacaaggtgtacgcctgcgaggtgacccaccagggactgtctagccccgtgaccaagagcttcaaccggggcgagtgctaa

SEQ ID NO: 914 - DNA, 660 bp, synthetic construct
  misc_feature 1..660: note = 2D10-hVH4-HVL4 light chain DNA sequence
  source 1..660: mol_type = other DNA
gacatagtgatgacccagagcccccttagccttcccgtgacactgggacagccggcgtctatttcttgtaggtcctctaaatctttgttgcacagtgatggaatcacatatctgtactggtaccagcagcggccaggacagagccctcagctgctgatatatcgaatgtcaaacctcgatagcggtgttcctgaccgcttttccggaagcggctccggcaccgactttaccttaaagatctctcgggttgaggccgaggacgtgggagtctactactgcgctcagatgatcgaatttcctctcacgttcggacaaggtacaaagttagagatcaagaggaccgtggccgcccccagcgtgttcatcttccctcccagcgacgagcagctgaagtctggcaccgccagcgtggtgtgcctgctgaacaacttctacccccgcgaggccaaggtgcagtggaaggtggacaacgccctgcagagcggcaacagccaggagagcgtgaccgagcaggactccaaggacagcacctacagcctgagcagcaccctgaccctgagcaaggccgactacgagaagcacaaggtgtacgcctgcgaggtgacccaccagggactgtctagccccgtgaccaagagcttcaaccggggcgagtgctaa

SEQ ID NO: 915 - DNA, 660 bp, synthetic construct; identical to SEQ ID NO: 911
  misc_feature 1..660: note = 2D10-hVH3-HVL1 light chain DNA sequence
  source 1..660: mol_type = other DNA

SEQ ID NO: 916 - DNA, 660 bp, synthetic construct; identical to SEQ ID NO: 912
  misc_feature 1..660: note = 2D10-hVH3-HVL2 light chain DNA sequence
  source 1..660: mol_type = other DNA

SEQ ID NO: 917 - DNA, 660 bp, synthetic construct; identical to SEQ ID NO: 913
  misc_feature 1..660: note = 2D10-hVH3-HVL3 light chain DNA sequence
  source 1..660: mol_type = other DNA

SEQ ID NO: 918 - DNA, 660 bp, synthetic construct; identical to SEQ ID NO: 914
  misc_feature 1..660: note = 2D10-hVH3-HVL4 light chain DNA sequence
  source 1..660: mol_type = other DNA

SEQ ID NO: 919 - DNA, 645 bp, synthetic construct
  misc_feature 1..645: note = 20H5.A3-VH3VL1 light chain DNA sequence
  source 1..645: mol_type = other DNA
gacatccagatgactcagtctccaagcagcctgtccgcttcagtcggggaccgagttacaatcacctgtcaggctagccaggacattagcaactatctgaactggtatcagcagaaacccggaaaggcccctaaacttctgatctactatacatcttcactgctgacgggtgtcccctcccggttctctggctccggctccggtaccgactatacctttactatctcatctctacagcccgaagacatcgcaacatattattgtcaacaatattctaagctgccctacactttcggccaaggaacaaagctggagattaagaggaccgtggccgcccccagcgtgttcatcttccctcccagcgacgagcagctgaagtctggcaccgccagcgtggtgtgcctgctgaacaacttctacccccgcgaggccaaggtgcagtggaaggtggacaacgccctgcagagcggcaacagccaggagagcgtgaccgagcaggactccaaggacagcacctacagcctgagcagcaccctgaccctgagcaaggccgactacgagaagcacaaggtgtacgcctgcgaggtgacccaccagggactgtctagccccgtgaccaagagcttcaaccggggcgagtgctaa

SEQ ID NO: 920 - DNA, 645 bp, synthetic construct
  misc_feature 1..645: note = 20H5.A3-VH3VL3 light chain DNA sequence
  source 1..645: mol_type = other DNA
gacattcagatgacccaatccccttcctccctaagcgccagcgtgggcgaccgcgtaaccatcacctgtcgagccagtcaggacatttcaaactacctgaactggtatcagcaaaaaccaggcaaagcacctaaactgctcatctactacacttccagtttgctttcaggtgtcccaagccgctttagtggatcaggttccggtaccgattacaccctgacgatctctagtctgcagccagaggacttcgctacgtactattgccagcaatatagcaagctgccctacaccttcggccagggcactaagctggaaatcaagaggaccgtggccgcccccagcgtgttcatcttccctcccagcgacgagcagctgaagtctggcaccgccagcgtggtgtgcctgctgaacaacttctacccccgcgaggccaaggtgcagtggaaggtggacaacgccctgcagagcggcaacagccaggagagcgtgaccgagcaggactccaaggacagcacctacagcctgagcagcaccctgaccctgagcaaggccgactacgagaagcacaaggtgtacgcctgcgaggtgacccaccagggactgtctagccccgtgaccaagagcttcaaccggggcgagtgctaa

SEQ ID NO: 921 - DNA, 645 bp, synthetic construct; identical to SEQ ID NO: 919
  misc_feature 1..645: note = 20H5.A3-VH4VL1 light chain DNA sequence
  source 1..645: mol_type = other DNA

SEQ ID NO: 922 - DNA, 645 bp, synthetic construct; identical to SEQ ID NO: 919
  misc_feature 1..645: note = 20H5.A3-VH5VL1 light chain DNA sequence
  source 1..645: mol_type = other DNA

SEQ ID NO: 923 - DNA, 645 bp, synthetic construct; identical to SEQ ID NO: 920
  misc_feature 1..645: note = 20H5.A3-VH5VL3 light chain DNA sequence
  source 1..645: mol_type = other DNA

SEQ ID NO: 924 - DNA, 645 bp, synthetic construct; identical to SEQ ID NO: 919
  misc_feature 1..645: note = 20H5.A3-VH6VL1 light chain DNA sequence
  source 1..645: mol_type = other DNA

SEQ ID NO: 925 - DNA, 645 bp, synthetic construct; identical to SEQ ID NO: 920
  misc_feature 1..645: note = 20H5.A3-VH6VL3 light chain DNA sequence
  source 1..645: mol_type = other DNA

SEQ ID NO: 926 - DNA, 21 bp, synthetic construct
  misc_feature 1..21: note = IFNg-2 forward primer
  source 1..21: mol_type = other DNA
acagcaaggcgaaaaaggatg

SEQ ID NO: 927 - DNA, 19 bp, synthetic construct
  misc_feature 1..19: note = IFNg-2 reverse primer
  source 1..19: mol_type = other DNA
tggtggaccactcggatga

SEQ ID NO: 928 - DNA, 23 bp, synthetic construct
  misc_feature 1..23: note = IL1beta forward primer
  source 1..23: mol_type = other DNA
atgatggcttattacagtggcaa

SEQ ID NO: 929 - DNA, 20 bp, synthetic construct
  misc_feature 1..20: note = IL1beta reverse primer
  source 1..20: mol_type = other DNA
gtcggacattcgtagctgga

SEQ ID NO: 930 - DNA, 23 bp, synthetic construct
  misc_feature 1..23: note = IL10-1 forward primer
  source 1..23: mol_type = other DNA
cttactgactggcatgaggatca

SEQ ID NO: 931 - DNA, 20 bp, synthetic construct
  misc_feature 1..20: note = IL10-1 reverse primer
  source 1..20: mol_type = other DNA
gcagctctaggagcatgtgg

SEQ ID NO: 932 - DNA, 20 bp, synthetic construct
  misc_feature 1..20: note = IL17a forward primer
  source 1..20: mol_type = other DNA
tgagcttcccagatcacaga

SEQ ID NO: 933 - DNA, 20 bp, synthetic construct
  misc_feature 1..20: note = IL17a reverse primer
  source 1..20: mol_type = other DNA
tccagaaggccctcagacta

SEQ ID NO: 934 - DNA, 20 bp, synthetic construct
  misc_feature 1..20: note = IL21 forward primer
  source 1..20: mol_type = other DNA
cgcctcctgattagacttcg

SEQ ID NO: 935 - DNA, 21 bp, synthetic construct
  misc_feature 1..21: note = IL21 reverse primer
  source 1..21: mol_type = other DNA
tgggtgtccttttctcatacg

SEQ ID NO: 936 - DNA, 20 bp, synthetic construct
  misc_feature 1..20: note = IL22 forward primer
  source 1..20: mol_type = other DNA
tcgccttgatctctccactc

SEQ ID NO: 937 - DNA, 20 bp, synthetic construct
  misc_feature 1..20: note = IL22 reverse primer
  source 1..20: mol_type = other DNA
gctcagctcctgtcacatca

SEQ ID NO: 938 - DNA, 20 bp, synthetic construct
  misc_feature 1..20: note = TGFbeta-2 forward primer
  source 1..20: mol_type = other DNA
gagcccgaagcggactacta

SEQ ID NO: 939 - DNA, 23 bp, synthetic construct
  misc_feature 1..23: note = TGFbeta-2 reverse primer
  source 1..23: mol_type = other DNA
tggttttctcatagatggcgttg

SEQ ID NO: 940 - protein, 112 aa, synthetic construct
  REGION 1..112: note = VH-78 Peptide Sequence
QVQLKQSGPELVKPGDSVKISCKAAGYTFSDYYINWVKQRPGQGLEWIGWIYPVSVNTKYNEKFKGKATLTVDTSSSTAYMQLSSLTSEDSGVYFCAYLDYWGQGTLVTVSA

SEQ ID NO: 941 - protein, 112 aa, synthetic construct
  REGION 1..112: note = VL-75 Peptide Sequence
DVVMTQTPLTLSVTIGQPASISCKSSQSLFHSDGKTYLNWLLQRPGQSPKRLIYLVSKLDSGVPDRFTGSGSGTDFTLKISRVEAEDLGVYYCWQGTHFPLTFGAGTKLEMK

SEQ ID NO: 942 - protein, 112 aa, synthetic construct
  REGION 1..112: note = VL-76 Peptide Sequence
DVVMTQTPLTLSVTIGQPASISCKSSQSLLHSDGKTYLNWLLQRPGQPPKRLMYLVSTLDSGVPDRFTGSGSGTDFTLKISRVEAEDLGVYYCWQGTHFPLTFGAGTKPELK

SEQ ID NO: 943 - protein, 112 aa, synthetic construct
  REGION 1..112: note = VL-77 Peptide Sequence
DIVMTQAAFSNPVTLGTSASISCRSSKSLLHSDGITYFYWYLQRPGQSPQLLIYRMSNLASGVPDRFSGSGSGTDFTLRISRVEAEDVGVYYCAQMLEFPLTFGAGTKLERA

SEQ ID NO: 944 - protein, 125 aa, synthetic construct
  REGION 1..125: note = Exemplary hIgG1, Ch2 constant heavy chain domain 2. Fc region
EPKSCDKTHTCPPCPAPELLGGPSVFLFPPKPKDTLMISRTPEVTCVVVDVSHEDPEVKFNWYVDGVEVHNAKTKPREEQYNSTYRVVSVLTVLHQDWLNGKEYKCKVSNKALPAPIEKTISKAK

SEQ ID NO: 945 - protein, 326 aa, synthetic construct
  REGION 1..326: note = Exemplary hIgG4 Fc region (S228P)
ASTKGPSVFPLAPCSRSTSESTAALGCLVKDYFPEPVTVSWNSGALTSGVHTFPAVLQSSGLYSLSSVVTVPSSSLGTKTYTCNVDHKPSNTKVDKRVESKYGPPCPPCPAPEFLGGPSVFLFPPKPKDTLMISRTPEVTCVVVDVSQEDPEVQFNWYVDGVEVHNAKTKPREEQFNSTYRVVSVLTVLHQDWLNGKEYKCKVSNKGLPSSIEKTISKAKGQPREPQVYTLPPSQEEMTKNQVSLTCLVKGFYPSDIAVEWESNGQPENNYKTTPPVLDSDGSFFLYSRLTVDKSRWQEGNVFSCSVMHEALHNHYTQKSLSLSLG

SEQ ID NO: 946 - protein, 107 aa, synthetic construct [sequence omitted]

SEQ ID NO: 947 - protein, 330 aa, synthetic construct
  REGION 1..330: note = Exemplary mIgG2A(LALAPG) Fc region
AKTTPPSVYPLAPVCGDTTGSSVTLGCLVKGYFPEPVTLTWNSGSLSSGVHTFPAVLQSDLYTLSSSVTVTSSTWPSQSITCNVAHPASSTKVDKKIEPRGPTIKPCPPCKCPAPNAAGGPSVFIFPPKIKDVLMISLSPIVTCVVVDVSEDDPDVQISWFVNNVEVHTAQTQTHREDYNSTLRVVSALPIQHQDWMSGKEFKCKVNNKDLGAPIERTISKPKGSVRAPQVYVLPPPEEEMTKKQVTLTCMVTDFMPEDIYVEWTNNGKTELNYKNTEPVLDSDGSYFMYSKLRVEKKNWVERNSYSCSVVHEGLHNHHTTKSFSRTPGK

SEQ ID NO: 948 - protein, 330 aa, synthetic construct
  REGION 1..330: note = Exemplary mIgG2A(LALA) Fc region
AKTTPPSVYPLAPVCGDTTGSSVTLGCLVKGYFPEPVTLTWNSGSLSSGVHTFPAVLQSDLYTLSSSVTVTSSTWPSQSITCNVAHPASSTKVDKKIEPRGPTIKPCPPCKCPAPNAAGGPSVFIFPPKIKDVLMISLSPIVTCVVVDVSEDDPDVQISWFVNNVEVHTAQTQTHREDYNSTLRVVSALPIQHQDWMSGKEFKCKVNNKDLPAPIERTISKPKGSVRAPQVYVLPPPEEEMTKKQVTLTCMVTDFMPEDIYVEWTNNGKTELNYKNTEPVLDSDGSYFMYSKLRVEKKNWVERNSYSCSVVHEGLHNHHTTKSFSRTPGK

SEQ ID NO: 949 - protein, 1382 aa, Homo sapiens
MATGGRRGAAAAPLLVAVAALLLGAAGHLYPGEVCPGMDIRNNLTRLHELENCSVIEGHLQILLMFKTRPEDFRDLSFPKLIMITDYLLLFRVYGLESLKDLFPNLTVIRGSRLFFNYALVIFEMVHLKELGLYNLMNITRGSVRIEKNNELCYLATIDWSRILDSVEDNYIVLNKDDNEECGDICPGTAKGKTNCPATVINGQFVERCWTHSHCQKVCPTICKSHGCTAEGLCCHSECLGNCSQPDDPTKCVACRNFYLDGRCVETCPPPYYHFQDWRCVNFSFCQDLHHKCKNSRRQGCHQYVIHNNKCIPECPSGYTMNSSNLLCTPCLGPCPKVCHLLEGEKTIDSVTSAQELRGCTVINGSLIINIRGGNNLAAELEANLGLIEEISGYLKIRRSYALVSLSFFRKLRLIRGETLEIGNYSFYALDNQNLRQLWDWSKHNLTITQGKLFFHYNPKLCLSEIHKMEEVSGTKGRQERNDIALKTNGDQASCENELLKFSYIRTSFDKILLRWEPYWPPDFRDLLGFMLFYKEAPYQNVTEFDGQDACGSNSWTVVDIDPPLRSNDPKSQNHPGWLMRGLKPWTQYAIFVKTLVTFSDERRTYGAKSDIIYVQTDATNPSVPLDPISVSNSSSQIILKWKPPSDPNGNITHYLVFWERQAEDSELFELDYCLKGLKLPSRTWSPPFESEDSQKHNQSEYEDSAGECCSCPKTDSQILKELEESSFRKTFEDYLHNVVFVPRKTSSGTGAEDPRPSRKRRSLGDVGNVTVAVPTVAAFPNTSSTSVPTSPEEHRPFEKVVNKESLVISGLRHFTGYRIELQACNQDTPEERCSVAAYVSARTMPEAKADDIVGPVTHEIFENNVVHLMWQEPKEPNGLIVLYEVSYRRYGDEELHLCVSRKHFALERGCRLRGLSPGNYSVRIRATSLAGNGSWTEPTYFYVTDYLDVPSNIAKIIIGPLIFVFLFSVVIGSIYLFLRKRQPDGPLGPLYASSNPEYLSASDVFPCSVYVPDEWEVSREKITLLRELGQGSFGMVYEGNARDIIKGEAETRVAVKTVNESASLRERIEFLNEASVMKGFTCHHVVRLLGVVSKGQPTLVVMELMAHGDLKSYLRSLRPEAENNPGRPPPTLQEMIQMAAEIADGMAYLNAKKFVHRDLAARNCMVAHDFTVKIGDFGMTRDIYETDYYRKGGKGLLPVRWMAPESLKDGVFTTSSDMWSFGVVLWEITSLAEQPYQGLSNEQVLKFVMDGGYLDQPDNCPERVTDLMRMCWQFNPKMRPTFLEIVNLLKDDLHPSFPEVSFFHSEENKAPESEELEMEFEDMENVPLDRSSHCQREEAGGRDGGSSLGFKRSYEEHIPYTHMNGGKKNGRILTLPRSNPS

SEQ ID NO: 950 - protein, 509 aa, Homo sapiens
MPSGFQQIGSEDGEPPQQRVTGTLVLAVFSAVLGSLQFGYNIGVINAPQKVIEQSYNETWLGRQGPEGPSSIPPGTLTTLWALSVAIFSVGGMISSFLIGIISQWLGRKRAMLVNNVLAVLGGSLMGLANAAASYEMLILGRFLIGAYSGLTSGLVPMYVGEIAPTHLRGALGTLNQLAIVIGILIAQVLGLESLLGTASLWPLLLGLTVLPALLQLVLLPFCPESPRYLYIIQNLEGPARKSLKRLTGWADVSGVLAELKDEKRKLERERPLSLLQLLGSRTHRQPLIIAVVLQLSQQLSGINAVFYYSTSIFETAGVGQPAYATIGAGVVNTVFTLVSVLLVERAGRRTLHLLGLAGMCGCAILMTVALLLLERVPAMSYVSIVAIFGFVAFFEIGPGPIPWFIVAELFSQGPRPAAMAVAGFSNWTSNFIIGMGFQYVAEAMGPYVFLLFAVLLLGFFIFTFLRVPETRGRTFDQISAAFHRTPSLLEQEVKPSTELEYLGPDEND

SEQ ID NO: 951 - protein, 8 aa, synthetic construct
  REGION 1..8: note = VH_CDR2_43
IYPGSNDA

SEQ ID NO: 952 - protein, 8 aa, synthetic construct
  REGION 1..8: note = VH_CDR2_44
IYPGSSDT

SEQ ID NO: 953 - protein, 13 aa, synthetic construct
  REGION 1..13: note = VH_CDR3_60
ANYFGASGWFFDV

SEQ ID NO: 954 - protein, 13 aa, synthetic construct
  REGION 1..13: note = VH_CDR3_61
ANYFGCSGWFFDV

SEQ ID NO: 955 - protein, 120 aa, synthetic construct
  REGION 1..120: note = VH-95 Peptide Sequence
QFQLQQSGPELVKPGASVKISCKASGYTFTDYYINWVKQRPGQGLEWIGWIYPGSQDTKYNEKFKGKATLTVDTSSSTAYMQLGSLTSEDSAVYFCANYFGASGWFFDVWGTGTTVTVSS

SEQ ID NO: 956 - protein, 120 aa, synthetic construct
  REGION 1..120: note = VH-96 Peptide Sequence
QFQLQQSGPELVKPGASVKISCKASGYTFTDYYINWVKQRPGQGLEWIGWIYPGSNDAKYNEKFKGKATLTVDTSSSTAYMQLGSLTSEDSAVYFCANYFGCSGWFFDVWGTGTTVTVSS

SEQ ID NO: 957 - protein, 120 aa, synthetic construct
  REGION 1..120: note = VH-97 Peptide Sequence
QFQLQQSGPELVKPGASVKISCKASGYTFTDYYINWVKQRPGQGLEWIGWIYPGSQDTKYNEKFKGKATLTVDTSSSTAYMQLGSLTSEDSAVYFCANYFGCSGWFFDVWGTGTTVTVSS

SEQ ID NO: 958 - protein, 120 aa, synthetic construct
  REGION 1..120: note = VH-98 Peptide Sequence
QFQLQQSGPELVKPGASVKISCKASGYTFTDYYINWVKQRPGQGLEWIGWIYPGSSDTKYNEKFKGKATLTVDTSSSTAYMQLGSLTSEDSAVYFCANYFGCSGWFFDVWGTGTTVTVSS

SEQ ID NO: 959 - protein, 120 aa, synthetic construct; identical to SEQ ID NO: 955
  REGION 1..120: note = VH-99 Peptide Sequence

SEQ ID NO: 960 - protein, 120 aa, synthetic construct
  REGION 1..120: note = VH-100 Peptide Sequence
QFQLQQSGPELVKPGASVKISCKASGYTFTDYYINWVKQRPGQGLEWIGWIYPGSQDTKYNEKFKGKATLTVDTSSSTAYMQLGSLTSEDSAVYFCANYFGSSGWFFDVWGTGTTVTVSS

SEQ ID NO: 961 - protein, 120 aa, synthetic construct
  REGION 1..120: note = VH-101 Peptide Sequence
QVQLVQSGAEVKKPGASVKVSCKASGYTFTDYYINWVRQAPGQGLEWMGWIYPGSQDTKYAQKFQGRVTMTVDTSISTAYMELSRLRSDDTAVYYCANYFGSSGWFFDVWGQGTMVTVSS

SEQ ID NO: 962 - protein, 120 aa, synthetic construct; identical to SEQ ID NO: 961
  REGION 1..120: note = VH-102 Peptide Sequence

SEQ ID NO: 963 - protein, 120 aa, synthetic construct; identical to SEQ ID NO: 961
  REGION 1..120: note = VH-103 Peptide Sequence

SEQ ID NO: 964 - protein, 120 aa, synthetic construct; identical to SEQ ID NO: 961
  REGION 1..120: note = VH-104 Peptide Sequence

SEQ ID NO: 965 - protein, 120 aa, synthetic construct
  REGION 1..120: note = VH-105 Peptide Sequence
QVQLVQSGAEVKKPGASVKVSCKASGYTFTDYYINWVRQAPGQGLEWMGWIYPGSQDTKYNEKFQGRVTLTVDTSISTAYMELSRLRSDDTAVYFCANYFGSSGWFFDVWGQGTMVTVSS

SEQ ID NO: 966 - protein, 120 aa, synthetic construct; identical to SEQ ID NO: 965
  REGION 1..120: note = VH-106 Peptide Sequence

SEQ ID NO: 967 - protein, 120 aa, synthetic construct; identical to SEQ ID NO: 965
  REGION 1..120: note = VH-107 Peptide Sequence

SEQ ID NO: 968 - protein, 120 aa, synthetic construct; identical to SEQ ID NO: 965
  REGION 1..120: note = VH-108 Peptide Sequence

SEQ ID NO: 969 - protein, 112 aa, synthetic construct; identical to SEQ ID NO: 383
  REGION 1..112: note = VL-93 Peptide Sequence

SEQ ID NO: 970 - protein, 112 aa, synthetic construct; identical to SEQ ID NO: 383
  REGION 1..112: note = VL-94 Peptide Sequence

SEQ ID NO: 971 - protein, 112 aa, synthetic construct; identical to SEQ ID NO: 383
  REGION 1..112: note = VL-95 Peptide Sequence

SEQ ID NO: 972 - protein, 112 aa, synthetic construct; identical to SEQ ID NO: 383
  REGION 1..112: note = VL-96 Peptide Sequence

SEQ ID NO: 973 - protein, 112 aa, synthetic construct; identical to SEQ ID NO: 383
  REGION 1..112: note = VL-97 Peptide Sequence

SEQ ID NO: 974 - protein, 112 aa, synthetic construct; identical to SEQ ID NO: 383
  REGION 1..112: note = VL-98 Peptide Sequence

SEQ ID NO: 975 - protein, 112 aa, synthetic construct; identical to SEQ ID NO: 821
  REGION 1..112: note = VL-99 Peptide Sequence

SEQ ID NO: 976 - protein, 112 aa, synthetic construct; identical to SEQ ID NO: 822
  REGION 1..112: note = VL-100 Peptide Sequence

SEQ ID NO: 977 - protein, 112 aa, synthetic construct; identical to SEQ ID NO: 823
  REGION 1..112: note = VL-101 Peptide Sequence

SEQ ID NO: 978 - protein, 112 aa, synthetic construct; identical to SEQ ID NO: 824
  REGION 1..112: note = VL-102 Peptide Sequence

SEQ ID NO: 979 - protein, 112 aa, synthetic construct; identical to SEQ ID NO: 821
  REGION 1..112: note = VL-103 Peptide Sequence

SEQ ID NO: 980 - protein, 112 aa, synthetic construct; identical to SEQ ID NO: 822
  REGION 1..112: note = VL-104 Peptide Sequence

SEQ ID NO: 981 - protein, 112 aa, synthetic construct; identical to SEQ ID NO: 823
  REGION 1..112: note = VL-105 Peptide Sequence

SEQ ID NO: 982 - protein, 112 aa, synthetic construct; identical to SEQ ID NO: 824
  REGION 1..112: note = VL-106 Peptide Sequence

SEQ ID NO: 983 - protein, 450 aa, synthetic construct
  REGION 1..450: note = 2D10.2B2-v2 heavy chain peptide sequence
QFQLQQSGPELVKPGASVKISCKASGYTFTDYYINWVKQRPGQGLEWIGWIYPGSQDTKYNEKFKGKATLTVDTSSSTAYMQLGSLTSEDSAVYFCANYFGASGWFFDVWGTGTTVTVSSAKTTPPSVYPLAPVCGDTTGSSVTLGCLVKGYFPEPVTLTWNSGSLSSGVHTFPAVLQSDLYTLSSSVTVTSSTWPSQSITCNVAHPASSTKVDKKIEPRGPTIKPCPPCKCPAPNAAGGPSVFIFPPKIKDVLMISLSPIVTCVVVDVSEDDPDVQISWFVNNVEVHTAQTQTHREDYNSTLRVVSALPIQHQDWMSGKEFKCKVNNKDLGAPIERTISKPKGSVRAPQVYVLPPPEEEMTKKQVTLTCMVTDFMPEDIYVEWTNNGKTELNYKNTEPVLDSDGSYFMYSKLRVEKKNWVERNSYSCSVVHEGLHNHHTTKSFSRTPGK

SEQ ID NO: 984 - protein, 446 aa, synthetic construct
  REGION 1..446: note = 2D10-VH0-NDA-VL0 heavy chain peptide sequence
QFQLQQSGPELVKPGASVKISCKASGYTFTDYYINWVKQRPGQGLEWIGWIYPGSNDAKYNEKFKGKATLTVDTSSSTAYMQLGSLTSEDSAVYFCANYFGCSGWFFDVWGTGTTVTVSSASTKGPSVFPLAPCSRSTSESTAALGCLVKDYFPEPVTVSWNSGALTSGVHTFPAVLQSSGLYSLSSVVTVPSSSLGTKTYTCNVDHKPSNTKVDKRVESKYGPPCPPCPAPEFLGGPSVFLFPPKPKDTLMISRTPEVTCVVVDVSQEDPEVQFNWYVDGVEVHNAKTKPREEQFNSTYRVVSVLTVLHQDWLNGKEYKCKVSNKGLPSSIEKTISKAKGQPREPQVYTLPPSQEEMTKNQVSLTCLVKGFYPSDIAVEWESNGQPENNYKTTPPVLDSDGSFFLYSRLTVDKSRWQEGNVFSCSVMHEALHNHYTQKSLSLSLG

SEQ ID NO: 985 - protein, 446 aa, synthetic construct
  REGION 1..446: note = 2D10-VH0-QDT-VL0 heavy chain peptide sequence
QFQLQQSGPELVKPGASVKISCKASGYTFTDYYINWVKQRPGQGLEWIGWIYPGSQDTKYNEKFKGKATLTVDTSSSTAYMQLGSLTSEDSAVYFCANYFGCSGWFFDVWGTGTTVTVSSASTKGPSVFPLAPCSRSTSESTAALGCLVKDYFPEPVTVSWNSGALTSGVHTFPAVLQSSGLYSLSSVVTVPSSSLGTKTYTCNVDHKPSNTKVDKRVESKYGPPCPPCPAPEFLGGPSVFLFPPKPKDTLMISRTPEVTCVVVDVSQEDPEVQFNWYVDGVEVHNAKTKPREEQFNSTYRVVSVLTVLHQDWLNGKEYKCKVSNKGLPSSIEKTISKAKGQPREPQVYTLPPSQEEMTKNQVSLTCLVKGFYPSDIAVEWESNGQPENNYKTTPPVLDSDGSFFLYSRLTVDKSRWQEGNVFSCSVMHEALHNHYTQKSLSLSLG

SEQ ID NO: 986 - protein, 446 aa, synthetic construct
  REGION 1..446: note = 2D10-VH0-SDT-VL0 heavy chain peptide sequence
QFQLQQSGPELVKPGASVKISCKASGYTFTDYYINWVKQRPGQGLEWIGWIYPGSSDTKYNEKFKGKATLTVDTSSSTAYMQLGSLTSEDSAVYFCANYFGCSGWFFDVWGTGTTVTVSSASTKGPSVFPLAPCSRSTSESTAALGCLVKDYFPEPVTVSWNSGALTSGVHTFPAVLQSSGLYSLSSVVTVPSSSLGTKTYTCNVDHKPSNTKVDKRVESKYGPPCPPCPAPEFLGGPSVFLFPPKPKDTLMISRTPEVTCVVVDVSQEDPEVQFNWYVDGVEVHNAKTKPREEQFNSTYRVVSVLTVLHQDWLNGKEYKCKVSNKGLPSSIEKTISKAKGQPREPQVYTLPPSQEEMTKNQVSLTCLVKGFYPSDIAVEWESNGQPENNYKTTPPVLDSDGSFFLYSRLTVDKSRWQEGNVFSCSVMHEALHNHYTQKSLSLSLG

SEQ ID NO: 987 - protein, 446 aa, synthetic construct
  REGION 1..446: note = 2D10-VH0-v1-QDT heavy chain peptide sequence
QFQLQQSGPELVKPGASVKISCKASGYTFTDYYINWVKQRPGQGLEWIGWIYPGSQDTKYNEKFKGKATLTVDTSSSTAYMQLGSLTSEDSAVYFCANYFGASGWFFDVWGTGTTVTVSSASTKGPSVFPLAPCSRSTSESTAALGCLVKDYFPEPVTVSWNSGALTSGVHTFPAVLQSSGLYSLSSVVTVPSSSLGTKTYTCNVDHKPSNTKVDKRVESKYGPPCPPCPAPEFLGGPSVFLFPPKPKDTLMISRTPEVTCVVVDVSQEDPEVQFNWYVDGVEVHNAKTKPREEQFNSTYRVVSVLTVLHQDWLNGKEYKCKVSNKGLPSSIEKTISKAKGQPREPQVYTLPPSQEEMTKNQVSLTCLVKGFYPSDIAVEWESNGQPENNYKTTPPVLDSDGSFFLYSRLTVDKSRWQEGNVFSCSVMHEALHNHYTQKSLSLSLG

SEQ ID NO: 988 - protein, 446 aa, synthetic construct
  REGION 1..446: note = 2D10-VH0-v2-QDT heavy chain peptide sequence
QFQLQQSGPELVKPGASVKISCKASGYTFTDYYINWVKQRPGQGLEWIGWIYPGSQDTKYNEKFKGKATLTVDTSSSTAYMQLGSLTSEDSAVYFCANYFGSSGWFFDVWGTGTTVTVSSASTKGPSVFPLAPCSRSTSESTAALGCLVKDYFPEPVTVSWNSGALTSGVHTFPAVLQSSGLYSLSSVVTVPSSSLGTKTYTCNVDHKPSNTKVDKRVESKYGPPCPPCPAPEFLGGPSVFLFPPKPKDTLMISRTPEVTCVVVDVSQEDPEVQFNWYVDGVEVHNAKTKPREEQFNSTYRVVSVLTVLHQDWLNGKEYKCKVSNKGLPSSIEKTISKAKGQPREPQVYTLPPSQEEMTKNQVSLTCLVKGFYPSDIAVEWESNGQPENNYKTTPPVLDSDGSFFLYSRLTVDKSRWQEGNVFSCSVMHEALHNHYTQKSLSLSLG

SEQ ID NO: 989 - protein, 446 aa, synthetic construct
  REGION 1..446: note = 2D10-hVH1-hVL1 heavy chain peptide sequence
QVQLVQSGAEVKKPGASVKVSCKASGYTFTDYYINWVRQAPGQGLEWMGWIYPGSQDTKYAQKFQGRVTMTVDTSISTAYMELSRLRSDDTAVYYCANYFGSSGWFFDVWGQGTMVTVSSASTKGPSVFPLAPCSRSTSESTAALGCLVKDYFPEPVTVSWNSGALTSGVHTFPAVLQSSGLYSLSSVVTVPSSSLGTKTYTCNVDHKPSNTKVDKRVESKYGPPCPPCPAPEFLGGPSVFLFPPKPKDTLMISRTPEVTCVVVDVSQEDPEVQFNWYVDGVEVHNAKTKPREEQFNSTYRVVSVLTVLHQDWLNGKEYKCKVSNKGLPSSIEKTISKAKGQPREPQVYTLPPSQEEMTKNQVSLTCLVKGFYPSDIAVEWESNGQPENNYKTTPPVLDSDGSFFLYSRLTVDKSRWQEGNVFSCSVMHEALHNHYTQKSLSLSLG

SEQ ID NO: 990 - protein, 446 aa, synthetic construct; identical to SEQ ID NO: 989
  REGION 1..446: note = 2D10-hVH1-hVL2 heavy chain peptide sequence

SEQ ID NO: 991 - protein, 446 aa, synthetic construct; identical to SEQ ID NO: 989
  REGION 1..446: note = 2D10-hVH1-hVL3 heavy chain peptide sequence

SEQ ID NO: 992 - protein, 446 aa, synthetic construct; identical to SEQ ID NO: 989
  REGION 1..446: note = 2D10-hVH1-hVL4 heavy chain peptide sequence

SEQ ID NO: 993 - protein, 446 aa, synthetic construct
  REGION 1..446: note = 2D10-hVH2-hVL1 heavy chain peptide sequence
QVQLVQSGAEVKKPGASVKVSCKASGYTFTDYYINWVRQAPGQGLEWMGWIYPGSQDTKYNEKFQGRVTLTVDTSISTAYMELSRLRSDDTAVYFCANYFGSSGWFFDVWGQGTMVTVSSASTKGPSVFPLAPCSRSTSESTAALGCLVKDYFPEPVTVSWNSGALTSGVHTFPAVLQSSGLYSLSSVVTVPSSSLGTKTYTCNVDHKPSNTKVDKRVESKYGPPCPPCPAPEFLGGPSVFLFPPKPKDTLMISRTPEVTCVVVDVSQEDPEVQFNWYVDGVEVHNAKTKPREEQFNSTYRVVSVLTVLHQDWLNGKEYKCKVSNKGLPSSIEKTISKAKGQPREPQVYTLPPSQEEMTKNQVSLTCLVKGFYPSDIAVEWESNGQPENNYKTTPPVLDSDGSFFLYSRLTVDKSRWQEGNVFSCSVMHEALHNHYTQKSLSLSLG

SEQ ID NO: 994 - protein, 446 aa, synthetic construct; identical to SEQ ID NO: 993
  REGION 1..446: note = 2D10-hVH2-hVL2 heavy chain peptide sequence

SEQ ID NO: 995 - protein, 446 aa, synthetic construct; identical to SEQ ID NO: 993
  REGION 1..446: note = 2D10-hVH2-hVL3 heavy chain peptide sequence

SEQ ID NO: 996 - protein, 446 aa, synthetic construct; identical to SEQ ID NO: 993
  REGION 1..446: note = 2D10-hVH2-hVL4 heavy chain peptide sequence

SEQ ID NO: 997 - protein, 219 aa, synthetic construct; identical to SEQ ID NO: 504
  REGION 1..219: note = 2D10.2B2-v2 light chain peptide sequence

SEQ ID NO: 998 - protein, 219 aa, synthetic construct; identical to SEQ ID NO: 805
  REGION 1..219: note = 2D10-VH0-NDA-VL0 light chain peptide sequence

SEQ ID NO: 999 - protein, 219 aa, synthetic construct; identical to SEQ ID NO: 805
  REGION 1..219: note = 2D10-VH0-QDT-VL0 light chain peptide sequence

SEQ ID NO: 1000 - protein, 219 aa, synthetic construct; identical to SEQ ID NO: 805
  REGION 1..219: note = 2D10-VH0-SDT-VL0 light chain peptide sequence

SEQ ID NO: 1001 - protein, 219 aa, synthetic construct; identical to SEQ ID NO: 805
  REGION 1..219: note = 2D10-VH0-v1-QDT light chain peptide sequence

SEQ ID NO: 1002 - protein, 219 aa, synthetic construct; identical to SEQ ID NO: 805
  REGION 1..219: note = 2D10-VH0-v2-QDT light chain peptide sequence

SEQ ID NO: 1003 - protein, 219 aa, synthetic construct; identical to SEQ ID NO: 851
  REGION 1..219: note = 2D10-hVH1-hVL1 light chain peptide sequence

SEQ ID NO: 1004 - protein, 219 aa, synthetic construct; identical to SEQ ID NO: 852
  REGION 1..219: note = 2D10-hVH1-hVL2 light chain peptide sequence

SEQ ID NO: 1005 - protein, 219 aa, synthetic construct; identical to SEQ ID NO: 853
  REGION 1..219: note = 2D10-hVH1-hVL3 light chain peptide sequence

SEQ ID NO: 1006 - protein, 219 aa, synthetic construct; identical to SEQ ID NO: 854
  REGION 1..219: note = 2D10-hVH1-hVL4 light chain peptide sequence

SEQ ID NO: 1007 - protein, 219 aa, synthetic construct; identical to SEQ ID NO: 851
  REGION 1..219: note = 2D10-hVH2-hVL1 light chain peptide sequence

SEQ ID NO: 1008 - protein, 219 aa, synthetic construct; identical to SEQ ID NO: 852
  REGION 1..219: note = 2D10-hVH2-hVL2 light chain peptide sequence

SEQ ID NO: 1009 - protein, 219 aa, synthetic construct; identical to SEQ ID NO: 853
  REGION 1..219: note = 2D10-hVH2-hVL3 light chain peptide sequence

SEQ ID NO: 1010 - protein, 219 aa, synthetic construct; identical to SEQ ID NO: 854
  REGION 1..219: note = 2D10-hVH2-hVL4 light chain peptide sequence

SEQ ID NO: 1011 - DNA, 360 bp, synthetic construct
  misc_feature 1..360: note = 2D10.2B2-v2 VH DNA sequence
  source 1..360: mol_type = other DNA
cagtttcagcttcaacagtctggtcctgaactcgtaaagcctggagccagtgtaaaaatatcctgtaaggcatcaggatacactttcaccgattactacatcaactgggtaaagcagcgacctggtcagggactggagtggattggctggatctaccccggatcacaagacaccaaatacaatgagaagttcaagggcaaagctacccttacagtcgatacctcctcctccaccgcatatatgcaacttgggtcactgacttcagaggattctgcagtctatttttgcgctaattactttggagccagcggctggtttttcgacgtgtggggaaccggaaccacagtgacagtatcctct

SEQ ID NO: 1012 - DNA, 360 bp, synthetic construct
  misc_feature 1..360: note = 2D10-VH0-NDA-VL0 VH DNA sequence
  source 1..360: mol_type = other DNA
cagtttcagcttcaacagtctggtcctgaactcgtaaagcctggagccagtgtaaaaatatcctgtaaggcatcaggatacactttcaccgattactacatcaactgggtaaagcagcgacctggtcagggactggagtggattggctggatctaccccggatcaaatgacgccaaatacaatgagaagttcaagggcaaagctacccttacagtcgatacctcctcctccaccgcatatatgcaacttgggtcactgacttcagaggattctgcagtctatttttgcgctaattactttggatgcagcggctggtttttcgacgtgtggggaaccggaaccacagtgacagtatcctct

SEQ ID NO: 1013 - DNA, 360 bp, synthetic construct
  misc_feature 1..360: note = 2D10-VH0-QDT-VL0 VH DNA sequence
  source 1..360: mol_type = other DNA
cagtttcagcttcaacagtctggtcctgaactcgtaaagcctggagccagtgtaaaaatatcctgtaaggcatcaggatacactttcaccgattactacatcaactgggtaaagcagcgacctggtcagggactggagtggattggctggatctaccccggatcacaagacaccaaatacaatgagaagttcaagggcaaagctacccttacagtcgatacctcctcctccaccgcatatatgcaacttgggtcactgacttcagaggattctgcagtctatttttgcgctaattactttggatgcagcggctggtttttcgacgtgtggggaaccggaaccacagtgacagtatcctct

SEQ ID NO: 1014 - DNA, 360 bp, synthetic construct
  misc_feature 1..360: note = 2D10-VH0-SDT-VL0 VH DNA sequence
  source 1..360: mol_type = other DNA
cagtttcagcttcaacagtctggtcctgaactcgtaaagcctggagccagtgtaaaaatatcctgtaaggcatcaggatacactttcaccgattactacatcaactgggtaaagcagcgacctggtcagggactggagtggattggctggatctaccccggatcatccgacaccaaatacaatgagaagttcaagggcaaagctacccttacagtcgatacctcctcctccaccgcatatatgcaacttgggtcactgacttcagaggattctgcagtctatttttgcgctaattactttggatgcagcggctggtttttcgacgtgtggggaaccggaaccacagtgacagtatcctct

SEQ ID NO: 1015 - DNA, 360 bp, synthetic construct; identical to SEQ ID NO: 1011
  misc_feature 1..360: note = 2D10-VH0-v1-QDT VH DNA sequence
  source 1..360: mol_type = other DNA

SEQ ID NO: 1016 - DNA, 360 bp, synthetic construct
  misc_feature 1..360: note = 2D10-VH0-v2-QDT VH DNA sequence
  source 1..360: mol_type = other DNA
cagtttcagcttcaacagtctggtcctgaactcgtaaagcctggagccagtgtaaaaatatcctgtaaggcatcaggatacactttcaccgattactacatcaactgggtaaagcagcgacctggtcagggactggagtggattggctggatctaccccggatcacaagacaccaaatacaatgagaagttcaagggcaaagctacccttacagtcgatacctcctcctccaccgcatatatgcaacttgggtcactgacttcagaggattctgcagtctatttttgcgctaattactttggatctagcggctggtttttcgacgtgtggggaaccggaaccacagtgacagtatcctct

SEQ ID NO: 1017 - DNA, 360 bp, synthetic construct
  misc_feature 1..360: note = 2D10-hVH1-hVL1 VH DNA sequence
  source 1..360: mol_type = other DNA
caggtacaactcgtgcagtcaggggctgaagtgaagaaacctggggctagtgttaaggtaagctgcaaggctagcggatacacattcacggattactatatcaattgggtgcggcaggctcctggacagggactcgaatggatgggttggatctaccctggatcccaggataccaagtatgcacagaaatttcagggccgcgtcacgatgacagttgacacatccatatcaacagcctacatggaactcagtagattgcggtctgacgacaccgccgtttactattgtgcgaactattttggatcaagcgggtggttctttgacgtttggggccagggtactatggtcacagtgagctct

SEQ ID NO: 1018 - DNA, 360 bp, synthetic construct; identical to SEQ ID NO: 1017
  misc_feature 1..360: note = 2D10-hVH1-hVL2 VH DNA sequence
  source 1..360: mol_type = other DNA

SEQ ID NO: 1019 - DNA, 360 bp, synthetic construct; identical to SEQ ID NO: 1017
  misc_feature 1..360: note = 2D10-hVH1-hVL3 VH DNA sequence
  source 1..360: mol_type = other DNA

SEQ ID NO: 1020 - DNA, 360 bp, synthetic construct; identical to SEQ ID NO: 1017
  misc_feature 1..360: note = 2D10-hVH1-hVL4 VH DNA sequence
  source 1..360: mol_type = other DNA

SEQ ID NO: 1021 - DNA, 360 bp, synthetic construct
  misc_feature 1..360: note = 2D10-hVH2-hVL1 VH DNA sequence
  source 1..360: mol_type = other DNA
caagtccagctggtccagtccggcgctgaagtgaaaaaacccggagcttcagttaaggtgagctgcaaggcttctggctatacattcactgattactatatcaattgggtacgtcaggcacctggccaaggcctcgagtggatggggtggatctatccagggtcccaggacacaaaatataatgaaaaatttcagggacgggtgaccctgacagtggacacctctattagcacggcctatatggagctgtccaggcttaggtctgatgacacagccgtctacttttgtgctaactatttcggctccagcggctggttctttgatgtctggggacaagggacaatggtgaccgtctcctca

SEQ ID NO: 1022 - DNA, 360 bp, synthetic construct; identical to SEQ ID NO: 1021
  misc_feature 1..360: note = 2D10-hVH2-hVL2 VH DNA sequence
  source 1..360: mol_type = other DNA

SEQ ID NO: 1023 - DNA, 360 bp, synthetic construct; identical to SEQ ID NO: 1021
  misc_feature 1..360: note = 2D10-hVH2-hVL3 VH DNA sequence
  source 1..360: mol_type = other DNA

SEQ ID NO: 1024 - DNA, 360 bp, synthetic construct; identical to SEQ ID NO: 1021
  misc_feature 1..360: note = 2D10-hVH2-hVL4 VH DNA sequence
  source 1..360: mol_type = other DNA

SEQ ID NO: 1025 - DNA, 336 bp, synthetic construct; identical to SEQ ID NO: 631
  misc_feature 1..336: note = 2D10.2B2-v2 VL DNA sequence
  source 1..336: mol_type = other DNA

SEQ ID NO: 1026 - DNA, 336 bp, synthetic construct; identical to SEQ ID NO: 631
  misc_feature 1..336: note = 2D10-VH0-NDA-VL0 VL DNA sequence
  source 1..336: mol_type = other DNA

SEQ ID NO: 1027 - DNA, 336 bp, synthetic construct; identical to SEQ ID NO: 631
  misc_feature 1..336: note = 2D10-VH0-QDT-VL0 VL DNA sequence
  source 1..336: mol_type = other DNA

SEQ ID NO: 1028 - DNA, 336 bp, synthetic construct; identical to SEQ ID NO: 631
  misc_feature 1..336: note = 2D10-VH0-SDT-VL0 VL DNA sequence
  source 1..336: mol_type = other DNA

SEQ ID NO: 1029 - DNA, 336 bp, synthetic construct; identical to SEQ ID NO: 631
  misc_feature 1..336: note = 2D10-VH0-v1-QDT VL DNA sequence
  source 1..336: mol_type = other DNA

SEQ ID NO: 1030 - DNA, 336 bp, synthetic construct; identical to SEQ ID NO: 631
  misc_feature 1..336: note = 2D10-VH0-v2-QDT VL DNA sequence
  source 1..336: mol_type = other DNA

SEQ ID NO: 1031 - DNA, 336 bp, synthetic construct; identical to SEQ ID NO: 881
  misc_feature 1..336: note = 2D10-hVH1-hVL1 VL DNA sequence
  source 1..336: mol_type = other DNA

SEQ ID NO: 1032 - DNA, 336 bp, synthetic construct; identical to SEQ ID NO: 882
  misc_feature 1..336: note = 2D10-hVH1-hVL2 VL DNA sequence
  source 1..336: mol_type = other DNA

SEQ ID NO: 1033 - DNA, 336 bp, synthetic construct; identical to SEQ ID NO: 883
  misc_feature 1..336: note = 2D10-hVH1-hVL3 VL DNA sequence
  source 1..336: mol_type = other DNA

SEQ ID NO: 1034 - DNA, 336 bp, synthetic construct; identical to SEQ ID NO: 884
  misc_feature 1..336: note = 2D10-hVH1-hVL4 VL DNA sequence
  source 1..336: mol_type = other DNA

SEQ ID NO: 1035 - DNA, 336 bp, synthetic construct; identical to SEQ ID NO: 881
  misc_feature 1..336: note = 2D10-hVH2-hVL1 VL DNA sequence
  source 1..336: mol_type = other DNA

SEQ ID NO: 1036 - DNA, 336 bp, synthetic construct; identical to SEQ ID NO: 882
  misc_feature 1..336: note = 2D10-hVH2-hVL2 VL DNA sequence
  source 1..336: mol_type = other DNA

SEQ ID NO: 1037 - DNA, 336 bp, synthetic construct; identical to SEQ ID NO: 883
  misc_feature 1..336: note = 2D10-hVH2-hVL3 VL DNA sequence
  source 1..336: mol_type = other DNA

SEQ ID NO: 1038 - DNA, 336 bp, synthetic construct; identical to SEQ ID NO: 884
  misc_feature 1..336: note = 2D10-hVH2-hVL4 VL DNA sequence
  source 1..336: mol_type = other DNA

SEQ ID NO: 1039 - DNA, 1356 bp, synthetic construct
  misc_feature 1..1356: note = 2D10.2B2-v2 heavy chain DNA sequence
  source 1..1356: mol_type = other DNA
cagtttcagcttcaacagtctggtcctgaactcgtaaagcctggagccagtgtaaaaatatcctgtaaggcatcaggatacactttcaccgattactacatcaactgggtaaagcagcgacctggtcagggactggagtggattggctggatctaccccggatcacaagacaccaaatacaatgagaagttcaagggcaaagctacccttacagtcgatacctcctcctccaccgcatatatgcaacttgggtcactgacttcagaggattctgcagtctatttttgcgctaattactttggagccagcggctggtttttcgacgtgtggggaaccggaaccacagtgacagtatcctctgctaagactactcctcccagtgtctaccccctggcccccgtgtgcggcgacacaacaggctcctccgtgacactgggctgcctggtgaaaggctacttccccgagcccgtgacactgacatggaactccggctccctgtcctccggcgtgcacacattccccgccgtgctgcagtccgacctgtacacactgtcctcctccgtgacagtgacatcctccacatggccctcccagtccatcacatgcaacgtggcccaccccgcctcctccacaaaagtggacaaaaaaatcgagcccaggggccccacaatcaaaccctgccccccctgcaaatgccccgcccccaacgccgccggcggcccctccgtgttcatcttcccccccaaaatcaaagacgtgctgatgatctccctgtcccccatcgtgacatgcgtggtggtggacgtgtccgaggacgaccccgacgtgcagatctcctggttcgtgaacaacgtggaggtgcacacagcccagacacagacacacagggaggactacaactccacactgagggtggtgtccgccctgcccatccagcaccaggactggatgtccggcaaagagttcaaatgcaaagtgaacaacaaagacctgggcgcccccatcgagaggacaatctccaaacccaaaggctccgtgagggccccccaggtgtacgtgctgcccccccccgaggaggagatgacaaaaaaacaggtgacactgacatgcatggtgacagacttcatgcccgaggacatctacgtggagtggacaaacaacggcaaaacagagctgaactacaaaaacacagagcccgtgctggactccgacggctcctacttcatgtactccaaactgagggtggagaaaaaaaactgggtggagaggaactcctactcctgctccgtggtgcacgagggcctgcacaaccaccacacaacaaaatccttctccaggacacccggcaaatagtaa

SEQ ID NO: 1040 - DNA, 1344 bp, synthetic construct
  misc_feature 1..1344: note = 2D10-VH0-NDA-VL0 heavy chain DNA sequence
  source 1..1344: mol_type = other DNA
cagtttcagcttcaacagtctggtcctgaactcgtaaagcctggagccagtgtaaaaatatcctgtaaggcatcaggatacactttcaccgattactacatcaactgggtaaagcagcgacctggtcagggactggagtggattggctggatctaccccggatcaaatgacgccaaatacaatgagaagttcaagggcaaagctacccttacagtcgatacctcctcctccaccgcatatatgcaacttgggtcactgacttcagaggattctgcagtctatttttgcgctaattactttggatgcagcggctggtttttcgacgtgtggggaaccggaaccacagtgacagtatcctctgctagcaccaagggccccagcgtgtttcctctcgctccctgcagccggagcacatccgagagcaccgctgctctgggctgtctcgtgaaggactacttccctgaacccgtcaccgtcagctggaatagcggcgccctgacatccggcgtccacacattccccgctgtcctgcagagcagcggcctgtacagcctgagctccgtggtcaccgtgcctagcagcagcctgggaacaaagacctacacctgcaacgtggaccataagccctccaacaccaaggtggacaagcgggtggaatccaagtatggacccccctgtcctccttgccctgctcctgaatttctcggaggcccctccgtcttcctgtttccccccaagcccaaggacaccctgatgatctcccggacacccgaagtcacctgcgtcgtggtggatgtcagccaggaagatcccgaggtgcagttcaactggtacgtggacggagtggaggtgcataacgccaaaaccaagcccagggaagagcagttcaacagcacctatcgggtcgtgtccgtgctcaccgtcctgcatcaggattggctcaacggcaaggagtacaagtgcaaggtgtccaacaagggcctgccctcctccatcgagaagaccatctccaaggctaagggccaacctcgggagccccaagtgtataccctccctcccagccaggaggagatgaccaagaatcaagtgagcctgacctgcctcgtgaagggattttacccctccgacatcgctgtggaatgggaaagcaatggccaacctgagaacaactacaagaccacaccccccgtgctggactccgatggctccttcttcctgtacagcaggctgaccgtggacaaatcccggtggcaagagggaaacgtgttcagctgctccgtgatgcacgaggctctccacaaccactacacccagaagagcctctccctgagcctcggctagtaa

SEQ ID NO: 1041 - DNA, 1344 bp, synthetic construct
  misc_feature 1..1344: note = 2D10-VH0-QDT-VL0 heavy chain DNA sequence
  source 1..1344: mol_type = other DNA
cagtttcagcttcaacagtctggtcctgaactcgtaaagcctggagccagtgtaaaaatatcctgtaaggcatcaggatacactttcaccgattactacatcaactgggtaaagcagcgacctggtcagggactggagtggattggctggatctaccccggatcacaagacaccaaatacaatgagaagttcaagggcaaagctacccttacagtcgatacctcctcctccaccgcatatatgcaacttgggtcactgacttcagaggattctgcagtctatttttgcgctaattactttggatgcagcggctggtttttcgacgtgtggggaaccggaaccacagtgacagtatcctctgctagcaccaagggccccagcgtgtttcctctcgctccctgcagccggagcacatccgagagcaccgctgctctgggctgtctcgtgaaggactacttccctgaacccgtcaccgtcagctggaatagcggcgccctgacatccggcgtccacacattccccgctgtcctgcagagcagcggcctgtacagcctgagctccgtggtcaccgtgcctagcagcagcctgggaacaaagacctacacctgcaacgtggaccataagccctccaacaccaaggtggacaagcgggtggaatccaagtatggacccccctgtcctccttgccctgctcctgaatttctcggaggcccctccgtcttcctgtttccccccaagcccaaggacaccctgatgatctcccggacacccgaagtcacctgcgtcgtggtggatgtcagccaggaagatcccgaggtgcagttcaactggtacgtggacggagtggaggtgcataacgccaaaaccaagcccagggaagagcagttcaacagcacctatcgggtcgtgtccgtgctcaccgtcctgcatcaggattggctcaacggcaaggagtacaagtgcaaggtgtccaacaagggcctgccctcctccatcgagaagaccatctccaaggctaagggccaacctcgggagccccaagtgtataccctccctcccagccaggaggagatgaccaagaatcaagtgagcctgacctgcctcgtgaagggattttacccctccgacatcgctgtggaatgggaaagcaatggccaacctgagaacaactacaagaccacaccccccgtgctggactccgatggctccttcttcctgtacagcaggctgaccgtggacaaatcccggtggcaagagggaaacgtgttcagctgctccgtgatgcacgaggctctccacaaccactacacccagaagagcctctccctgagcctcggctagtaa

SEQ ID NO: 1042 - DNA, 1344 bp, synthetic construct
  misc_feature 1..1344: note = 2D10-VH0-SDT-VL0 heavy chain DNA sequence
  source 1..1344: mol_type = other DNA
cagtttcagcttcaacagtctggtcctgaactcgtaaagcctggagccagtgtaaaaatatcctgtaaggcatcaggatacactttcaccgattactacatcaactgggtaaagcagcgacctggtcagggactggagtggattggctggatctaccccggatcatccgacaccaaatacaatgagaagttcaagggcaaagctacccttacagtcgatacctcctcctccaccgcatatatgcaacttgggtcactgacttcagaggattctgcagtctatttttgcgctaattactttggatgcagcggctggtttttcgacgtgtggggaaccggaaccacagtgacagtatcctctgctagcaccaagggccccagcgtgtttcctctcgctccctgcagccggagcacatccgagagcaccgctgctctgggctgtctcgtgaaggactacttccctgaacccgtcaccgtcagctggaatagcggcgccctgacatccggcgtccacacattccccgctgtcctgcagagcagcggcctgtacagcctgagctccgtggtcaccgtgcctagcagcagcctgggaacaaagacctacacctgcaacgtggaccataagccctccaacaccaaggtggacaagcgggtggaatccaagtatggacccccctgtcctccttgccctgctcctgaatttctcggaggcccctccgtcttcctgtttccccccaagcccaaggacaccctgatgatctcccggacacccgaagtcacctgcgtcgtggtggatgtcagccaggaagatcccgaggtgcagttcaactggtacgtggacggagtggaggtgcataacgccaaaaccaagcccagggaagagcagttcaacagcacctatcgggtcgtgtccgtgctcaccgtcctgcatcaggattggctcaacggcaaggagtacaagtgcaaggtgtccaacaagggcctgccctcctccatcgagaagaccatctccaaggctaagggccaacctcgggagccccaagtgtataccctccctcccagccaggaggagatgaccaagaatcaagtgagcctgacctgcctcgtgaagggattttacccctccgacatcgctgtggaatgggaaagcaatggccaacctgagaacaactacaagaccacaccccccgtgctggactccgatggctccttcttcctgtacagcaggctgaccgtggacaaatcccggtggcaagagggaaacgtgttcagctgctccgtgatgcacgaggctctccacaaccactacacccagaagagcctctccctgagcctcggctagtaa

SEQ ID NO: 1043 - DNA, 1344 bp, synthetic construct
  misc_feature 1..1344: note = 2D10-VH0-v1-QDT heavy chain DNA sequence
  source 1..1344: mol_type = other DNA
cagtttcagcttcaacagtctggtcctgaactcgtaaagcctggagccagtgtaaaaatatcctgtaaggcatcaggatacactttcaccgattactacatcaactgggtaaagcagcgacctggtcagggactggagtggattggctggatctaccccggatcacaagacaccaaatacaatgagaagttcaagggcaaagctacccttacagtcgatacctcctcctccaccgcatatatgcaacttgggtcactgacttcagaggattctgcagtctatttttgcgctaattactttggagccagcggctggtttttcgacgtgtggggaaccggaaccacagtgacagtatcctctgctagcaccaagggccccagcgtgtttcctctcgctccctgcagccggagcacatccgagagcaccgctgctctgggctgtctcgtgaaggactacttccctgaacccgtcaccgtcagctggaatagcggcgccctgacatccggcgtccacacattccccgctgtcctgcagagcagcggcctgtacagcctgagctccgtggtcaccgtgcctagcagcagcctgggaacaaagacctacacctgcaacgtggaccataagccctccaacaccaaggtggacaagcgggtggaatccaagtatggacccccctgtcctccttgccctgctcctgaatttctcggaggcccctccgtcttcctgtttccccccaagcccaaggacaccctgatgatctcccggacacccgaagtcacctgcgtcgtggtggatgtcagccaggaagatcccgaggtgcagttcaactggtacgtggacggagtggaggtgcataacgccaaaaccaagcccagggaagagcagttcaacagcacctatcgggtcgtgtccgtgctcaccgtcctgcatcaggattggctcaacggcaaggagtacaagtgcaaggtgtccaacaagggcctgccctcctccatcgagaagaccatctccaaggctaagggccaacctcgggagccccaagtgtataccctccctcccagccaggaggagatgaccaagaatcaagtgagcctgacctgcctcgtgaagggattttacccctccgacatcgctgtggaatgggaaagcaatggccaacctgagaacaactacaagaccacaccccccgtgctggactccgatggctccttcttcctgtacagcaggctgaccgtggacaaatcccggtggcaagagggaaacgtgttcagctgctccgtgatgcacgaggctctccacaaccactacacccagaagagcctctccctgagcctcggctagtaa

SEQ ID NO: 1044 - DNA, 1344 bp, synthetic construct
  misc_feature 1..1344: note = 2D10-VH0-v2-QDT heavy chain DNA sequence
  source 1..1344: mol_type = other DNA
cagtttcagcttcaacagtctggtcctgaactcgtaaagcctggagccagtgtaaaaatatcctgtaaggcatcaggatacactttcaccgattactacatcaactgggtaaagcagcgacctggtcagggactggagtggattggctggatctaccccggatcacaagacaccaaatacaatgagaagttcaagggcaaagctacccttacagtcgatacctcctcctccaccgcatatatgcaacttgggtcactgacttcagaggattctgcagtctatttttgcgctaattactttggatctagcggctggtttttcgacgtgtggggaaccggaaccacagtgacagtatcctctgctagcaccaagggccccagcgtgtttcctctcgctccctgcagccggagcacatccgagagcaccgctgctctgggctgtctcgtgaaggactacttccctgaacccgtcaccgtcagctggaatagcggcgccctgacatccggcgtccacacattccccgctgtcctgcagagcagcggcctgtacagcctgagctccgtggtcaccgtgcctagcagcagcctgggaacaaagacctacacctgcaacgtggaccataagccctccaacaccaaggtggacaagcgggtggaatccaagtatggacccccctgtcctccttgccctgctcctgaatttctcggaggcccctccgtcttcctgtttccccccaagcccaaggacaccctgatgatctcccggacacccgaagtcacctgcgtcgtggtggatgtcagccaggaagatcccgaggtgcagttcaactggtacgtggacggagtggaggtgcataacgccaaaaccaagcccagggaagagcagttcaacagcacctatcgggtcgtgtccgtgctcaccgtcctgcatcaggattggctcaacggcaaggagtacaagtgcaaggtgtccaacaagggcctgccctcctccatcgagaagaccatctccaaggctaagggccaacctcgggagccccaagtgtataccctccctcccagccaggaggagatgaccaagaatcaagtgagcctgacctgcctcgtgaagggattttacccctccgacatcgctgtggaatgggaaagcaatggccaacctgagaacaactacaagaccacaccccccgtgctggactccgatggctccttcttcctgtacagcaggctgaccgtggacaaatcccggtggcaagagggaaacgtgttcagctgctccgtgatgcacgaggctctccacaaccactacacccagaagagcctctccctgagcctcggctagtaa

SEQ ID NO: 1045 - DNA, 1344 bp, synthetic construct
  misc_feature 1..1344: note = 2D10-hVH1-hVL1 heavy chain DNA sequence
  source 1..1344: mol_type = other DNA
caggtacaactcgtgcagtcaggggctgaagtgaagaaacctggggctagtgttaaggtaagctgcaaggctagcggatacacattcacggattactatatcaattgggtgcggcaggctcctggacagggactcgaatggatgggttggatctaccctggatcccaggataccaagtatgcacagaaatttcagggccgcgtcacgatgacagttgacacatccatatcaacagcctacatggaactcagtagattgcggtctgacgacaccgccgtttactattgtgcgaactattttggatcaagcgggtggttctttgacgtttggggccagggtactatggtcacagtgagctctgctagcaccaagggccccagcgtgtttcctctcgctccctgcagccggagcacatccgagagcaccgctgctctgggctgtctcgtgaaggactacttccctgaacccgtcaccgtcagctggaatagcggcgccctgacatccggcgtccacacattccccgctgtcctgcagagcagcggcctgtacagcctgagctccgtggtcaccgtgcctagcagcagcctgggaacaaagacctacacctgcaacgtggaccataagccctccaacaccaaggtggacaagcgggtggaatccaagtatggacccccctgtcctccttgccctgctcctgaatttctcggaggcccctccgtcttcctgtttccccccaagcccaaggacaccctgatgatctcccggacacccgaagtcacctgcgtcgtggtggatgtcagccaggaagatcccgaggtgcagttcaactggtacgtggacggagtggaggtgcataacgccaaaaccaagcccagggaagagcagttcaacagcacctatcgggtcgtgtccgtgctcaccgtcctgcatcaggattggctcaacggcaaggagtacaagtgcaaggtgtccaacaagggcctgccctcctccatcgagaagaccatctccaaggctaagggccaacctcgggagccccaagtgtataccctccctcccagccaggaggagatgaccaagaatcaagtgagcctgacctgcctcgtgaagggattttacccctccgacatcgctgtggaatgggaaagcaatggccaacctgagaacaactacaagaccacaccccccgtgctggactccgatggctccttcttcctgtacagcaggctgaccgtggacaaatcccggtggcaagagggaaacgtgttcagctgctccgtgatgcacgaggctctccacaaccactacacccagaagagcctctccctgagcctcggctagtaa

SEQ ID NO: 1046 - DNA, 1344 bp, synthetic construct; identical to SEQ ID NO: 1045
  misc_feature 1..1344: note = 2D10-hVH1-hVL2 heavy chain DNA sequence
  source 1..1344: mol_type = other DNA

SEQ ID NO: 1047 - DNA, 1344 bp, synthetic construct; identical to SEQ ID NO: 1045
  misc_feature 1..1344: note = 2D10-hVH1-hVL3 heavy chain DNA sequence
  source 1..1344: mol_type = other DNA

SEQ ID NO: 1048 - DNA, 1344 bp, synthetic construct; identical to SEQ ID NO: 1045
  misc_feature 1..1344: note = 2D10-hVH1-hVL4 heavy chain DNA sequence
  source 1..1344: mol_type = other DNA

SEQ ID NO: 1049 - DNA, 1344 bp, synthetic construct
  misc_feature 1..1344: note = 2D10-hVH2-hVL1 heavy chain DNA sequence
  source 1..1344: mol_type = other DNA
caagtccagctggtccagtccggcgctgaagtgaaaaaacccggagcttcagttaaggtgagctgcaaggcttctggctatacattcactgattactatatcaattgggtacgtcaggcacctggccaaggcctcgagtggatggggtggatctatccagggtcccaggacacaaaatataatgaaaaatttcagggacgggtgaccctgacagtggacacctctattagcacggcctatatggagctgtccaggcttaggtctgatgacacagccgtctacttttgtgctaactatttcggctccagcggctggttctttgatgtctggggacaagggacaatggtgaccgtctcctcagctagcaccaagggccccagcgtgtttcctctcgctccctgcagccggagcacatccgagagcaccgctgctctgggctgtctcgtgaaggactacttccctgaacccgtcaccgtcagctggaatagcggcgccctgacatccggcgtccacacattccccgctgtcctgcagagcagcggcctgtacagcctgagctccgtggtcaccgtgcctagcagcagcctgggaacaaagacctacacctgcaacgtggaccataagccctccaacaccaaggtggacaagcgggtggaatccaagtatggacccccctgtcctccttgccctgctcctgaatttctcggaggcccctccgtcttcctgtttccccccaagcccaaggacaccctgatgatctcccggacacccgaagtcacctgcgtcgtggtggatgtcagccaggaagatcccgaggtgcagttcaactggtacgtggacggagtggaggtgcataacgccaaaaccaagcccagggaagagcagttcaacagcacctatcgggtcgtgtccgtgctcaccgtcctgcatcaggattggctcaacggcaaggagtacaagtgcaaggtgtccaacaagggcctgccctcctccatcgagaagaccatctccaaggctaagggccaacctcgggagccccaagtgtataccctccctcccagccaggaggagatgaccaagaatcaagtgagcctgacctgcctcgtgaagggattttacccctccgacatcgctgtggaatgggaaagcaatggccaacctgagaacaactacaagaccacaccccccgtgctggactccgatggctccttcttcctgtacagcaggctgaccgtggacaaatcccggtggcaagagggaaacgtgttcagctgctccgtgatgcacgaggctctccacaaccactacacccagaagagcctctccctgagcctcggctagtaa

SEQ ID NO: 1050 - DNA, 1344 bp, synthetic construct; identical to SEQ ID NO: 1049
  misc_feature 1..1344: note = 2D10-hVH2-hVL2 heavy chain DNA sequence
  source 1..1344: mol_type = other DNA

SEQ ID NO: 1051 - DNA, 1344 bp, synthetic construct; identical to SEQ ID NO: 1049
  misc_feature 1..1344: note = 2D10-hVH2-hVL3 heavy chain DNA sequence
  source 1..1344: mol_type = other DNA

SEQ ID NO: 1052 - DNA, 1344 bp, synthetic construct; identical to SEQ ID NO: 1049
  misc_feature 1..1344: note = 2D10-hVH2-hVL4 heavy chain DNA sequence
  source 1..1344: mol_type = other DNA

SEQ ID NO: 1053 - DNA, 663 bp, synthetic construct
  misc_feature 1..663: note = 2D10.2B2-v2 light chain DNA sequence
  source 1..663: mol_type = other DNA
gacatagtaatgacacaggccgcatttagcaatccagtaaccttgggcacatccgcctccatatcttgcaggtcatccaaaagcttgctgcactctgacggtattacttacctgtactggtatttgcagcgacctgggcaatcccctcaactcctgatttaccgcatgagcaacctggcctcaggggtgcctgaccgcttttcaggatcagggagcggcactgacttcaccttgcgaatcagcagagtagaagcagaggatgttggagtttactactgtgcccagatgatcgaatttccacttacttttggggccgggaccattctggagcttaaacgtgctgatgttgcccctactgtgtccatcttccccccctcctccgagcagctgacatccggcggcgcctccgtggtgtgcttcctgaacaacttctaccccaaagacatcaacgtgaaatggaaaatcgacggctccgagaggcagaacggcgtgctgaactcctggacagaccaggactccaaagactccacatactccatgtcctccacactgacactgacaaaagacgagtacgagaggcacaactcctacacatgcgaggccacacacaaaacatccacatcccccatcgtgaaatccttcaacaggaacgagtgctaataa

SEQ ID NO: 1054 - DNA, 660 bp, synthetic construct; identical to SEQ ID NO: 760
  misc_feature 1..660: note = 2D10-VH0-NDA-VL0 light chain DNA sequence
  source 1..660: mol_type = other DNA

SEQ ID NO: 1055 - DNA, 660 bp, synthetic construct; identical to SEQ ID NO: 760
  misc_feature 1..660: note = 2D10-VH0-QDT-VL0 light chain DNA sequence
  source 1..660: mol_type = other DNA

SEQ ID NO: 1056 - DNA, 660 bp, synthetic construct; identical to SEQ ID NO: 760
  misc_feature 1..660: note = 2D10-VH0-SDT-VL0 light chain DNA sequence
  source 1..660: mol_type = other DNA

SEQ ID NO: 1057 - DNA, 660 bp, synthetic construct; identical to SEQ ID NO: 760
  misc_feature 1..660: note = 2D10-VH0-v1-QDT light chain DNA sequence
  source 1..660: mol_type = other DNA

SEQ ID NO: 1058 - DNA, 660 bp, synthetic construct; identical to SEQ ID NO: 760
  misc_feature 1..660: note = 2D10-VH0-v2-QDT light chain DNA sequence
  source 1..660: mol_type = other DNA

SEQ ID NO: 1059 - DNA, 660 bp, synthetic construct; identical to SEQ ID NO: 911
  misc_feature 1..660: note = 2D10-hVH1-hVL1 light chain DNA sequence
  source 1..660: mol_type = other DNA

SEQ ID NO: 1060 - DNA, 660 bp, synthetic construct; identical to SEQ ID NO: 912
  misc_feature 1..660: note = 2D10-hVH1-hVL2 light chain DNA sequence
  source 1..660: mol_type = other DNA

SEQ ID NO: 1061 - DNA, 660 bp, synthetic construct; identical to SEQ ID NO: 913
  misc_feature 1..660: note = 2D10-hVH1-hVL3 light chain DNA sequence
  source 1..660: mol_type = other DNA

SEQ ID NO: 1062 - DNA, 660 bp, synthetic construct; identical to SEQ ID NO: 914
  misc_feature 1..660: note = 2D10-hVH1-hVL4 light chain DNA sequence
  source 1..660: mol_type = other DNA

SEQ ID NO: 1063 - DNA, 660 bp, synthetic construct; identical to SEQ ID NO: 911
  misc_feature 1..660: note = 2D10-hVH2-hVL1 light chain DNA sequence
  source 1..660: mol_type = other DNA

SEQ ID NO: 1064 - DNA, 660 bp, synthetic construct; identical to SEQ ID NO: 912
  misc_feature 1..660: note = 2D10-hVH2-hVL2 light chain DNA sequence
  source 1..660: mol_type = other DNA

SEQ ID NO: 1065 - DNA, 660 bp, synthetic construct; identical to SEQ ID NO: 913
  misc_feature 1..660: note = 2D10-hVH2-hVL3 light chain DNA sequence
  source 1..660: mol_type = other DNA

SEQ ID NO: 1066 - DNA, 660 bp, synthetic construct; identical to SEQ ID NO: 914
  misc_feature 1..660: note = 2D10-hVH2-hVL4 light chain DNA sequence
  source 1..660: mol_type = other DNA

SEQ ID NO: 1067 - protein, 116 aa, synthetic construct; identical to SEQ ID NO: 305
  REGION 1..116: note = VH-109 Peptide Sequence

SEQ ID NO: 1068 - protein, 116 aa, synthetic construct; identical to SEQ ID NO: 305
  REGION 1..116: note = VH-110 Peptide Sequence

SEQ ID NO: 1069 - protein, 116 aa, synthetic construct; identical to SEQ ID NO: 305
  REGION 1..116: note = VH-111 Peptide Sequence

SEQ ID NO: 1070 - protein, 116 aa, synthetic construct
  REGION 1..116: note = VH-112 Peptide Sequence
QIQLVQSGPELKKPGESVKISCKASGYAFTTYGMSWVQQAPGKGLKWMGWVNTYSGVPTYADDFKGRFAFSLETSASTAYLQINNLRNEDTATYFCARGPYAMDYWGQGTSVTVSS

SEQ ID NO: 1071 - protein, 116 aa, synthetic construct; identical to SEQ ID NO: 1070
  REGION 1..116: note = VH-113 Peptide Sequence

SEQ ID NO: 1072 - protein, 116 aa, synthetic construct
  REGION 1..116: note = VH-114 Peptide Sequence
QIQLVQSGPELKKPGESVKISCKASGYAFTTYGMSWVQQAPGKGLKWMGWVNTYSGVPTSADDFKGRFAFSLETSASTAYLQINNLRNEDTATYFCARGPYAMDYWGQGTSVTVSS

SEQ ID NO: 1073 - protein, 116 aa, synthetic construct; identical to SEQ ID NO: 1072
  REGION 1..116: note = VH-115 Peptide Sequence

SEQ ID NO: 1074 - protein, 116 aa, synthetic construct
  REGION 1..116: note = VH-116 Peptide Sequence
QVQLVQSGSELKKPGASVKVSCKASGYAFTTYGMSWVRQAPGQGLEWMGWVNTYSGVPTYAQGFTGRFVFSLDTSVSTAYLQISSLKAEDTAVYYCARGPYAMDYWGQGTLVTVSS

SEQ ID NO: 1075 - protein, 116 aa, synthetic construct; identical to SEQ ID NO: 1074
  REGION 1..116: note = VH-117 Peptide Sequence

SEQ ID NO: 1076 - protein, 116 aa, synthetic construct; identical to SEQ ID NO: 1074
  REGION 1..116: note = VH-118 Peptide Sequence

SEQ ID NO: 1077 - protein, 116 aa, synthetic construct; identical to SEQ ID NO: 1074
  REGION 1..116: note = VH-119 Peptide Sequence

SEQ ID NO: 1078 - protein, 116 aa, synthetic construct; identical to SEQ ID NO: 1074
  REGION 1..116: note = VH-120 Peptide Sequence

SEQ ID NO: 1079 - protein, 116 aa, synthetic construct; identical to SEQ ID NO: 1074
  REGION 1..116: note = VH-121 Peptide Sequence

SEQ ID NO: 1080 - protein, 116 aa, synthetic construct
  REGION 1..116: note = VH-122 Peptide Sequence
QVQLVQSGSELKKPGASVKVSCKASGYAFTTYGMSWVRQAPGQGLEWMGWVNTYSGVPTSAQGFTGRFVFSLDTSVSTAYLQISSLKAEDTAVYYCARGPYAMDYWGQGTLVTVSS

SEQ ID NO: 1081 - protein, 116 aa, synthetic construct; identical to SEQ ID NO: 1080
  REGION 1..116: note = VH-123 Peptide Sequence

SEQ ID NO: 1082 - protein, 116 aa, synthetic construct; identical to SEQ ID NO: 1080
  REGION 1..116: note = VH-124 Peptide Sequence

SEQ ID NO: 1083 - protein, 116 aa, synthetic construct; identical to SEQ ID NO: 1080
  REGION 1..116: note = VH-125 Peptide Sequence

SEQ ID NO: 1084 - protein, 116 aa, synthetic construct; identical to SEQ ID NO: 814
  REGION 1..116: note = VH-126 Peptide Sequence

SEQ ID NO: 1085 - protein, 116 aa, synthetic construct; identical to SEQ ID NO: 814
  REGION 1..116: note = VH-127 Peptide Sequence

SEQ ID NO: 1086 - protein, 116 aa, synthetic construct; identical to SEQ ID NO: 816
  REGION 1..116: note = VH-128 Peptide Sequence

SEQ ID NO: 1087 - protein, 116 aa, synthetic construct; identical to SEQ ID NO: 816
  REGION 1..116: note = VH-129 Peptide Sequence

SEQ ID NO: 1088 - protein, 116 aa, synthetic construct; identical to SEQ ID NO: 816
  REGION 1..116: note = VH-130 Peptide Sequence

SEQ ID NO: 1089 - protein, 116 aa, synthetic construct; identical to SEQ ID NO: 816
  REGION 1..116: note = VH-131 Peptide Sequence

SEQ ID NO: 1090 - protein, 116 aa, synthetic construct; identical to SEQ ID NO: 817
  REGION 1..116: note = VH-132 Peptide Sequence

SEQ ID NO: 1091 - protein, 116 aa, synthetic construct; identical to SEQ ID NO: 817
  REGION 1..116: note = VH-133 Peptide Sequence

SEQ ID NO: 1092 - protein, 116 aa, synthetic construct; identical to SEQ ID NO: 819
  REGION 1..116: note = VH-134 Peptide Sequence

SEQ ID NO: 1093 - protein, 116 aa, synthetic construct; identical to SEQ ID NO: 819
  REGION 1..116: note = VH-135 Peptide Sequence

SEQ ID NO: 1094 - protein, 116 aa, synthetic construct; identical to SEQ ID NO: 819
  REGION 1..116: note = VH-136 Peptide Sequence

SEQ ID NO: 1095 - protein, 116 aa, synthetic construct
  REGION 1..116: note = VH-137 Peptide Sequence
QIQLVQSGFELKKPGASVKISCKASGYAFTTYGMSWVRQAPGQGLEWMGWVNTYSGVPTYADAFTGRFVFSLDTSVSTAYLQISSLKAEDTAVYFCARGPYAMDYWGQGTLVTVSS

SEQ ID NO: 1096 - protein, 116 aa, synthetic construct; identical to SEQ ID NO: 1095
  REGION 1..116: note = VH-138 Peptide Sequence

SEQ ID NO: 1097 - protein, 116 aa, synthetic construct; identical to SEQ ID NO: 1095
  REGION 1..116: note = VH-139 Peptide Sequence

SEQ ID NO: 1098 - protein, 116 aa, synthetic construct; identical to SEQ ID NO: 1095
  REGION 1..116: note = VH-140 Peptide Sequence

SEQ ID NO: 1099 - protein, 116 aa, synthetic construct; identical to SEQ ID NO: 1095
  REGION 1..116: note = VH-141 Peptide Sequence

SEQ ID NO: 1100 - protein, 116 aa, synthetic construct; identical to SEQ ID NO: 1095
  REGION 1..116: note = VH-142 Peptide Sequence

SEQ ID NO: 1101 - protein, 116 aa, synthetic construct; identical to SEQ ID NO: 814
  REGION 1..116: note = VH-143 Peptide Sequence

SEQ ID NO: 1102 - protein, 116 aa, synthetic construct; identical to SEQ ID NO: 814
  REGION 1..116: note = VH-144 Peptide Sequence

SEQ ID NO: 1103 - protein, 116 aa, synthetic construct; identical to SEQ ID NO: 814
  REGION 1..116: note = VH-145 Peptide Sequence

SEQ ID NO: 1104 - protein, 116 aa, synthetic construct; identical to SEQ ID NO: 817
  REGION 1..116: note = VH-146 Peptide Sequence

SEQ ID NO: 1105 - protein, 116 aa, synthetic construct; identical to SEQ ID NO: 817
  REGION 1..116: note = VH-147 Peptide Sequence

SEQ ID NO: 1106 - protein, 116 aa, synthetic construct; identical to SEQ ID NO: 817
  REGION 1..116: note = VH-148 Peptide Sequence

SEQ ID NO: 1107 - protein, 116 aa, synthetic construct; identical to SEQ ID NO: 819
  REGION 1..116: note = VH-149 Peptide Sequence

SEQ ID NO: 1108 - protein, 116 aa, synthetic construct; identical to SEQ ID NO: 819
  REGION 1..116: note = VH-150 Peptide Sequence

SEQ ID NO: 1109 - protein, 116 aa, synthetic construct; identical to SEQ ID NO: 819
  REGION 1..116: note = VH-151 Peptide Sequence

SEQ ID NO: 1110 - protein, 107 aa, synthetic construct; identical to SEQ ID NO: 382
  REGION 1..107: note = VL-107 Peptide Sequence

SEQ ID NO: 1111 - protein, 107 aa, synthetic construct
  REGION 1..107: note = VL-108 Peptide Sequence
DIQMTQTTSSLSASLGDRVTINCSASQDISNYLNWYQQKPDGTVKLLIYYTSSLLSGVPSRFSGSGSGTDYSLTISNLEPEDIATYFCQQYSKLPYTFGSGTKLEIK

SEQ ID NO: 1112 - protein, 107 aa, synthetic construct
  REGION 1..107: note = VL-109 Peptide Sequence
DIQMTQTTSSLSASLGDRVTISCSASQDISNYLNWYQQKPDGTVKLLIYYTSSLLSGVPSRFSGSGSGTDYSLTISNLEPEDIATYFCQQYSKLPYTFGSGTHLEIK

SEQ ID NO: 1113 - protein, 107 aa, synthetic construct; identical to SEQ ID NO: 382
  REGION 1..107: note = VL-110 Peptide Sequence

SEQ ID NO: 1114 - protein, 107 aa, synthetic construct; identical to SEQ ID NO: 1112
  REGION 1..107: note = VL-111 Peptide Sequence

SEQ ID NO: 1115 - protein, 107 aa, synthetic construct; identical to SEQ ID NO: 382
  REGION 1..107: note = VL-112 Peptide Sequence

SEQ ID NO: 1116 - protein, 107 aa, synthetic construct; identical to SEQ ID NO: 1112
  REGION 1..107: note = VL-113 Peptide Sequence

SEQ ID NO: 1117 - protein, 107 aa, synthetic construct; identical to SEQ ID NO: 829
  REGION 1..107: note = VL-114 Peptide Sequence

SEQ ID NO: 1118 - protein, 107 aa, synthetic construct
  REGION 1..107: note = VL-115 Peptide Sequence
DIQMTQSPSSLSASVGDRVTITCSASQDISNYLNWYQQKPGKAPKLLIYYTSSLLTGVPSRFSGSGSGTDYTFTISSLQPEDIATYFCQQYSKLPYTFGQGTKLEIK

SEQ ID NO: 1119 - protein, 107 aa, synthetic construct; identical to SEQ ID NO: 830
  REGION 1..107: note = VL-116 Peptide Sequence

SEQ ID NO: 1120 - protein, 107 aa, synthetic construct
  REGION 1..107: note = VL-117 Peptide Sequence
DIQMTQSPSSLSASVGDRVTITCSASQDISNYLNWYQQKPGKAPKLLIYYTSSLLSGVPSRFSGSGSGTDYTLTISSLQPEDFATYFCQQYSKLPYTFGQGTKLEIK

SEQ ID NO: 1121 - protein, 107 aa, synthetic construct
  REGION 1..107: note = VL-118 Peptide Sequence
DIQMTQSPSSLSASVGDRVTINCSASQDISNYLNWYQQKPGKAPKLLIYYTSSLLTGVPSRFSGSGSGTDYTFTISSLQPEDIATYFCQQYSKLPYTFGQGTKLEIK

SEQ ID NO: 1122 - protein, 107 aa, synthetic construct
  REGION 1..107: note = VL-119 Peptide Sequence
DIQMTQSPSSLSASVGDRVTINCSASQDISNYLNWYQQKPGKAPKLLIYYTSSLLSGVPSRFSGSGSGTDYTLTISSLQPEDFATYFCQQYSKLPYTFGQGTKLEIK

SEQ ID NO: 1123 - protein, 107 aa, synthetic construct; identical to SEQ ID NO: 830
  REGION 1..107: note = VL-120 Peptide Sequence

SEQ ID NO: 1124 - protein, 107 aa, synthetic construct; identical to SEQ ID NO: 1120
  REGION 1..107: note = VL-121 Peptide Sequence

SEQ ID NO: 1125 - protein, 107 aa, synthetic construct; identical to SEQ ID NO: 1121
  REGION 1..107: note = VL-122 Peptide Sequence

SEQ ID NO: 1126 - protein, 107 aa, synthetic construct; identical to SEQ ID NO: 1122
  REGION 1..107: note = VL-123 Peptide Sequence

SEQ ID NO: 1127 - protein, 107 aa, synthetic construct; identical to SEQ ID NO: 1121
  REGION 1..107: note = VL-124 Peptide Sequence

SEQ ID NO: 1128 - protein, 107 aa, synthetic construct; identical to SEQ ID NO: 1122
  REGION 1..107: note = VL-125 Peptide Sequence

SEQ ID NO: 1129 - protein, 107 aa, synthetic construct; identical to SEQ ID NO: 830
  REGION 1..107: note = VL-126 Peptide Sequence

SEQ ID NO: 1130 - protein, 107 aa, synthetic construct; identical to SEQ ID NO: 1120
  REGION 1..107: note = VL-127 Peptide Sequence

SEQ ID NO: 1131 - protein, 107 aa, synthetic construct; identical to SEQ ID NO: 1121
  REGION 1..107: note = VL-128 Peptide Sequence

SEQ ID NO: 1132 - protein, 107 aa, synthetic construct; identical to SEQ ID NO: 1122
  REGION 1..107: note = VL-129 Peptide Sequence

SEQ ID NO: 1133 - protein, 107 aa, synthetic construct; identical to SEQ ID NO: 1121
  REGION 1..107: note = VL-130 Peptide Sequence

SEQ ID NO: 1134 - protein, 107 aa, synthetic construct; identical to SEQ ID NO: 1122
  REGION 1..107: note = VL-131 Peptide Sequence

SEQ ID NO: 1135 - protein, 107 aa, synthetic construct; identical to SEQ ID NO: 1120
  REGION 1..107: note = VL-132 Peptide Sequence

SEQ ID NO: 1136 - protein, 107 aa, synthetic construct; identical to SEQ ID NO: 1121
  REGION 1..107: note = VL-133 Peptide Sequence

SEQ ID NO: 1137 - protein, 107 aa, synthetic construct; identical to SEQ ID NO: 1122
  REGION 1..107: note = VL-134 Peptide Sequence

SEQ ID NO: 1138 - protein, 107 aa, synthetic construct; identical to SEQ ID NO: 829
  REGION 1..107: note = VL-135 Peptide Sequence

SEQ ID NO: 1139 - protein, 107 aa, synthetic construct; identical to SEQ ID NO: 1118
  REGION 1..107: note = VL-136 Peptide Sequence

SEQ ID NO: 1140 - protein, 107 aa, synthetic construct; identical to SEQ ID NO: 830
  REGION 1..107: note = VL-137 Peptide Sequence

SEQ ID NO: 1141 - protein, 107 aa, synthetic construct; identical to SEQ ID NO: 1120
  REGION 1..107: note = VL-138 Peptide Sequence

SEQ ID NO: 1142 - protein, 107 aa, synthetic construct; identical to SEQ ID NO: 1121
  REGION 1..107: note = VL-139 Peptide Sequence

SEQ ID NO: 1143 - protein, 107 aa, synthetic construct; identical to SEQ ID NO: 1122
  REGION 1..107: note = VL-140 Peptide Sequence

SEQ ID NO: 1144 - protein, 107 aa, synthetic construct; identical to SEQ ID NO: 829
  REGION 1..107: note = VL-141 Peptide Sequence

SEQ ID NO: 1145 - protein, 107 aa, synthetic construct; identical to SEQ ID NO: 829
  REGION 1..107: note = VL-142 Peptide Sequence

SEQ ID NO: 1146 - protein, 107 aa, synthetic construct; identical to SEQ ID NO: 829
  REGION 1..107: note = VL-143 Peptide Sequence

SEQ ID NO: 1147 - protein, 107 aa, synthetic construct; identical to SEQ ID NO: 829
  REGION 1..107: note = VL-144 Peptide Sequence

SEQ ID NO: 1148 - protein, 107 aa, synthetic construct; identical to SEQ ID NO: 829
  REGION 1..107: note = VL-145 Peptide Sequence

SEQ ID NO: 1149 - protein, 107 aa, synthetic construct; identical to SEQ ID NO: 829
  REGION 1..107: note = VL-146 Peptide Sequence

SEQ ID NO: 1150 - protein, 107 aa, synthetic construct; identical to SEQ ID NO: 829
  REGION 1..107: note = VL-147 Peptide Sequence

SEQ ID NO: 1151 - protein, 107 aa, synthetic construct; identical to SEQ ID NO: 829
  REGION 1..107: note = VL-148 Peptide Sequence

SEQ ID NO: 1152 - protein, 107 aa, synthetic construct; identical to SEQ ID NO: 829
  REGION 1..107: note = VL-149 Peptide Sequence

SEQ ID NO: 1153 - protein, 442 aa, synthetic construct
  REGION 1..442: note = 20H5.A3-hIgG4 (S228P) heavy chain peptide sequence
QIQLVQSGPELKKPGESVKISCKASGYAFTTYGMSWVQQAPGKGLKWMGWVNTYSGVPTCADDFKGRFAFSLETSASTAYLQINNLRNEDTATYFCARGPYAMDYWGQGTSVTVSSASTKGPSVFPLAPCSRSTSESTAALGCLVKDYFPEPVTVSWNSGALTSGVHTFPAVLQSSGLYSLSSVVTVPSSSLGTKTYTCNVDHKPSNTKVDKRVESKYGPPCPPCPAPEFLGGPSVFLFPPKPKDTLMISRTPEVTCVVVDVSQEDPEVQFNWYVDGVEVHNAKTKPREEQFNSTYRVVSVLTVLHQDWLNGKEYKCKVSNKGLPSSIEKTISKAKGQPREPQVYTLPPSQEEMTKNQVSLTCLVKGFYPSDIAVEWESNGQPENNYKTTPPVLDSDGSFFLYSRLTVDKSRWQEGNVFSCSVMHEALHNHYTQKSLSLSLG

SEQ ID NO: 1154 - protein, 442 aa, synthetic construct; identical to SEQ ID NO: 1153
  REGION 1..442: note = 20H5.A3-hIgG4 (S28P)-mv2 heavy chain peptide sequence

SEQ ID NO: 1155 - protein, 442 aa, synthetic construct; identical to SEQ ID NO: 1153
  REGION 1..442: note = 798-9.20H5.A3-mH0mL1 heavy chain peptide sequence

SEQ ID NO: 1156 - protein, 442 aa, synthetic construct
  REGION 1..442: note = 798-9.20H5.A3-mH1mL0 heavy chain peptide sequence
QIQLVQSGPELKKPGESVKISCKASGYAFTTYGMSWVQQAPGKGLKWMGWVNTYSGVPTYADDFKGRFAFSLETSASTAYLQINNLRNEDTATYFCARGPYAMDYWGQGTSVTVSSASTKGPSVFPLAPCSRSTSESTAALGCLVKDYFPEPVTVSWNSGALTSGVHTFPAVLQSSGLYSLSSVVTVPSSSLGTKTYTCNVDHKPSNTKVDKRVESKYGPPCPPCPAPEFLGGPSVFLFPPKPKDTLMISRTPEVTCVVVDVSQEDPEVQFNWYVDGVEVHNAKTKPREEQFNSTYRVVSVLTVLHQDWLNGKEYKCKVSNKGLPSSIEKTISKAKGQPREPQVYTLPPSQEEMTKNQVSLTCLVKGFYPSDIAVEWESNGQPENNYKTTPPVLDSDGSFFLYSRLTVDKSRWQEGNVFSCSVMHEALHNHYTQKSLSLSLG

SEQ ID NO: 1157 - protein, 442 aa, synthetic construct; identical to SEQ ID NO: 1156
  REGION 1..442: note = 798-9.20H5.A3-mH1mL1 heavy chain peptide sequence

SEQ ID NO: 1158 - protein, 442 aa, synthetic construct
  REGION 1..442: note = 798-9.20H5.A3-mH2mL0 heavy chain peptide sequence
QIQLVQSGPELKKPGESVKISCKASGYAFTTYGMSWVQQAPGKGLKWMGWVNTYSGVPTSADDFKGRFAFSLETSASTAYLQINNLRNEDTATYFCARGPYAMDYWGQGTSVTVSSASTKGPSVFPLAPCSRSTSESTAALGCLVKDYFPEPVTVSWNSGALTSGVHTFPAVLQSSGLYSLSSVVTVPSSSLGTKTYTCNVDHKPSNTKVDKRVESKYGPPCPPCPAPEFLGGPSVFLFPPKPKDTLMISRTPEVTCVVVDVSQEDPEVQFNWYVDGVEVHNAKTKPREEQFNSTYRVVSVLTVLHQDWLNGKEYKCKVSNKGLPSSIEKTISKAKGQPREPQVYTLPPSQEEMTKNQVSLTCLVKGFYPSDIAVEWESNGQPENNYKTTPPVLDSDGSFFLYSRLTVDKSRWQEGNVFSCSVMHEALHNHYTQKSLSLSLG

SEQ ID NO: 1159 - protein, 442 aa, synthetic construct; identical to SEQ ID NO: 1158
  REGION 1..442: note = 798-9.20H5.A3-mH2mL1 heavy chain peptide sequence

SEQ ID NO: 1160 - protein, 442 aa, synthetic construct
  REGION 1..442: note = 20H5.A3-VH1VL1 heavy chain peptide sequence
QVQLVQSGSELKKPGASVKVSCKASGYAFTTYGMSWVRQAPGQGLEWMGWVNTYSGVPTYAQGFTGRFVFSLDTSVSTAYLQISSLKAEDTAVYYCARGPYAMDYWGQGTLVTVSSASTKGPSVFPLAPCSRSTSESTAALGCLVKDYFPEPVTVSWNSGALTSGVHTFPAVLQSSGLYSLSSVVTVPSSSLGTKTYTCNVDHKPSNTKVDKRVESKYGPPCPPCPAPEFLGGPSVFLFPPKPKDTLMISRTPEVTCVVVDVSQEDPEVQFNWYVDGVEVHNAKTKPREEQFNSTYRVVSVLTVLHQDWLNGKEYKCKVSNKGLPSSIEKTISKAKGQPREPQVYTLPPSQEEMTKNQVSLTCLVKGFYPSDIAVEWESNGQPENNYKTTPPVLDSDGSFFLYSRLTVDKSRWQEGNVFSCSVMHEALHNHYTQKSLSLSLG

SEQ ID NO: 1161 - protein, 442 aa, synthetic construct; identical to SEQ ID NO: 1160
  REGION 1..442: note = 20H5.A3-VH1VL2 heavy chain peptide sequence

SEQ ID NO: 1162 - protein, 442 aa, synthetic construct; identical to SEQ ID NO: 1160
  REGION 1..442: note = 20H5.A3-VH1VL3 heavy chain peptide sequence

SEQ ID NO: 1163 - protein, 442 aa, synthetic construct; identical to SEQ ID NO: 1160
  REGION 1..442: note = 20H5.A3-VH1VL4 heavy chain peptide sequence

SEQ ID NO: 1164 - protein, 442 aa, synthetic construct; identical to SEQ ID NO: 1160
  REGION 1..442: note = 20H5.A3-VH1VL5 heavy chain peptide sequence

SEQ ID NO: 1165 - protein, 442 aa, synthetic construct; identical to SEQ ID NO: 1160
  REGION 1..442: note = 20H5.A3-VH1VL6 heavy chain peptide sequence

SEQ ID NO: 1166 - protein, 442 aa, synthetic construct
  REGION 1..442: note = 20H5.A3-VH2VL3 heavy chain peptide sequence
QVQLVQSGSELKKPGASVKVSCKASGYAFTTYGMSWVRQAPGQGLEWMGWVNTYSGVPTSAQGFTGRFVFSLDTSVSTAYLQISSLKAEDTAVYYCARGPYAMDYWGQGTLVTVSSASTKGPSVFPLAPCSRSTSESTAALGCLVKDYFPEPVTVSWNSGALTSGVHTFPAVLQSSGLYSLSSVVTVPSSSLGTKTYTCNVDHKPSNTKVDKRVESKYGPPCPPCPAPEFLGGPSVFLFPPKPKDTLMISRTPEVTCVVVDVSQEDPEVQFNWYVDGVEVHNAKTKPREEQFNSTYRVVSVLTVLHQDWLNGKEYKCKVSNKGLPSSIEKTISKAKGQPREPQVYTLPPSQEEMTKNQVSLTCLVKGFYPSDIAVEWESNGQPENNYKTTPPVLDSDGSFFLYSRLTVDKSRWQEGNVFSCSVMHEALHNHYTQKSLSLSLG

SEQ ID NO: 1167 - protein, 442 aa, synthetic construct; identical to SEQ ID NO: 1166
  REGION 1..442: note = 20H5.A3-VH2VL4 heavy chain peptide sequence

SEQ ID NO: 1168 - protein, 442 aa, synthetic construct; identical to SEQ ID NO: 1166
  REGION 1..442: note = 20H5.A3-VH2VL5 heavy chain peptide sequence

SEQ ID NO: 1169 - protein, 442 aa, synthetic construct; identical to SEQ ID NO: 1166
  REGION 1..442: note = 20H5.A3-VH2VL6 heavy chain peptide sequence

SEQ ID NO: 1170 - protein, 442 aa, synthetic construct; identical to SEQ ID NO: 844
  REGION 1..442: note = 20H5.A3-VH3VL5 heavy chain peptide sequence

SEQ ID NO: 1171 - protein, 442 aa, synthetic construct; identical to SEQ ID NO: 844
  REGION 1..442: note = 20H5.A3-VH3VL6 heavy chain peptide sequence

SEQ ID NO: 1172 - protein, 442 aa, synthetic construct; identical to SEQ ID NO: 846
  REGION 1..442: note = 20H5.A3-VH4VL3 heavy chain peptide sequence

SEQ ID NO: 1173 - protein, 442 aa, synthetic construct; identical to SEQ ID NO: 846
  REGION 1..442: note = 20H5.A3-VH4VL4 heavy chain peptide sequence

SEQ ID NO: 1174 - protein, 442 aa, synthetic construct; identical to SEQ ID NO: 846
  REGION 1..442: note = 20H5.A3-VH4VL5 heavy chain peptide sequence

SEQ ID NO: 1175 - protein, 442 aa, synthetic construct; identical to SEQ ID NO: 846
  REGION 1..442: note = 20H5.A3-VH4VL6 heavy chain peptide sequence

SEQ ID NO: 1176 - protein, 442 aa, synthetic construct; identical to SEQ ID NO: 847
  REGION 1..442: note = 20H5.A3-VH5VL5 heavy chain peptide sequence

SEQ ID NO: 1177 - protein, 442 aa, synthetic construct; identical to SEQ ID NO: 847
  REGION 1..442: note = 20H5.A3-VH5VL6 heavy chain peptide sequence

SEQ ID NO: 1178 - protein, 442 aa, synthetic construct; identical to SEQ ID NO: 849
  REGION 1..442: note = 20H5.A3-VH6VL4 heavy chain peptide sequence

SEQ ID NO: 1179 - protein, 442 aa, synthetic construct; identical to SEQ ID NO: 849
  REGION 1..442: note = 20H5.A3-VH6VL5 heavy chain peptide sequence

SEQ ID NO: 1180 - protein, 442 aa, synthetic construct; identical to SEQ ID NO: 849
  REGION 1..442: note = 20H5.A3-VH6VL6 heavy chain peptide sequence

SEQ ID NO: 1181 - protein, 442 aa, synthetic construct
  REGION 1..442: note = 20H5.A3-VH7VL1 heavy chain peptide sequence
QIQLVQSGFELKKPGASVKISCKASGYAFTTYGMSWVRQAPGQGLEWMGWVNTYSGVPTYADAFTGRFVFSLDTSVSTAYLQISSLKAEDTAVYFCARGPYAMDYWGQGTLVTVSSASTKGPSVFPLAPCSRSTSESTAALGCLVKDYFPEPVTVSWNSGALTSGVHTFPAVLQSSGLYSLSSVVTVPSSSLGTKTYTCNVDHKPSNTKVDKRVESKYGPPCPPCPAPEFLGGPSVFLFPPKPKDTLMISRTPEVTCVVVDVSQEDPEVQFNWYVDGVEVHNAKTKPREEQFNSTYRVVSVLTVLHQDWLNGKEYKCKVSNKGLPSSIEKTISKAKGQPREPQVYTLPPSQEEMTKNQVSLTCLVKGFYPSDIAVEWESNGQPENNYKTTPPVLDSDGSFFLYSRLTVDKSRWQEGNVFSCSVMHEALHNHYTQKSLSLSLG

SEQ ID NO: 1182 - protein, 442 aa, synthetic construct; identical to SEQ ID NO: 1181
  REGION 1..442: note = 20H5.A3-VH7VL2 heavy chain peptide sequence

SEQ ID NO: 1183 - protein, 442 aa, synthetic construct; identical to SEQ ID NO: 1181
  REGION 1..442: note = 20H5.A3-VH7VL3 heavy chain peptide sequence

SEQ ID NO: 1184 - protein, 442 aa, synthetic construct; identical to SEQ ID NO: 1181
  REGION 1..442: note = 20H5.A3-VH7VL4 heavy chain peptide sequence

SEQ ID NO: 1185 - protein, 442 aa, synthetic construct; identical to SEQ ID NO: 1181
  REGION 1..442: note = 20H5.A3-VH7VL5 heavy chain peptide sequence

SEQ ID NO: 1186 - protein, 442 aa, synthetic construct; identical to SEQ ID NO: 1181
  REGION 1..442: note = 20H5.A3-VH7VL6 heavy chain peptide sequence

SEQ ID NO: 1187 - protein, 445 aa, synthetic construct
  REGION 1..445: note = 20H5.A3_hVH3VL1-hIgG1 (KEMv2) heavy chain peptide sequence
QIQLVQSGSELKKPGASVKVSCKASGYAFTTYGMSWVRQAPGQGLEWMGWVNTYSGVPTYADDFTGRFVFSLETSVSTAYLQISSLKAEDTAVYFCARGPYAMDYWGQGTLVTVSSASTKGPSVFPLAPSSKSTSGGTAALGCLVKDYFPEPVTVSWNSGALTSGVHTFPAVLQSSGLYSLSSVVTVPSSSLGTQTYICNVNHKPSNTKVDKKVEPKSCDKTHTCPPCPAPELLGGPSVFLFPPKPKDTLMISRTPEVTCVVVDVSHEDPEVKFNWYVDGVEVHNAKTKPREEQYNSTYRVVSVLTVLHQDWLNGKEYKCKVSNKALPAPIEKTISKAKGQPREPQVYTLPPSREEMTKNQVSLTCLVKGFYPSDIAVEWESNGQPENNYKTTPPVLDSDGSFFLYSKLTVDKSRWQQGNVFSCSVMHEALHNHYTQKSLSLSPG

SEQ ID NO: 1188 - protein, 445 aa, synthetic construct
  REGION 1..445: note = 20H5.A3_hVH3VL1-hIgG1 (LALAPGv2) heavy chain peptide sequence
QIQLVQSGSELKKPGASVKVSCKASGYAFTTYGMSWVRQAPGQGLEWMGWVNTYSGVPTYADDFTGRFVFSLETSVSTAYLQISSLKAEDTAVYFCARGPYAMDYWGQGTLVTVSSASTKGPSVFPLAPSSKSTSGGTAALGCLVKDYFPEPVTVSWNSGALTSGVHTFPAVLQSSGLYSLSSVVTVPSSSLGTQTYICNVNHKPSNTKVDKKVEPKSCDKTHTCPPCPAPEAAGGPSVFLFPPKPKDTLMISRTPEVTCVVVDVSHEDPEVKFNWYVDGVEVHNAKTKPREEQYNSTYRVVSVLTVLHQDWLNGKEYKCKVSNKALGAPIEKTISKAKGQPREPQVYTLPPSREEMTKNQVSLTCLVKGFYPSDIAVEWESNGQPENNYKTTPPVLDSDGSFFLYSKLTVDKSRWQQGNVFSCSVMHEALHNHYTQKSLSLSPG

SEQ ID NO: 1189 - protein, 445 aa, synthetic construct
  REGION 1..445: note = 20H5.A3_hVH3VL1-hIgG1 (REM) heavy chain peptide sequence
QIQLVQSGSELKKPGASVKVSCKASGYAFTTYGMSWVRQAPGQGLEWMGWVNTYSGVPTYADDFTGRFVFSLETSVSTAYLQISSLKAEDTAVYFCARGPYAMDYWGQGTLVTVSSASTKGPSVFPLAPSSKSTSGGTAALGCLVKDYFPEPVTVSWNSGALTSGVHTFPAVLQSSGLYSLSSVVTVPSSSLGTQTYICNVNHKPSNTKVDKRVEPKSCDKTHTCPPCPAPELLGGPSVFLFPPKPKDTLMISRTPEVTCVVVDVSHEDPEVKFNWYVDGVEVHNAKTKPREEQYNSTYRVVSVLTVLHQDWLNGKEYKCKVSNKALPAPIEKTISKAKGQPREPQVYTLPPSREEMTKNQVSLTCLVKGFYPSDIAVEWESNGQPENNYKTTPPVLDSDGSFFLYSKLTVDKSRWQQGNVFSCSVMHEALHNHYTQKSLSLSPG

SEQ ID NO: 1190 - protein, 445 aa, synthetic construct
  REGION 1..445: note = 20H5.A3_hVH5VL1-hIgG1 (KEMv2) heavy chain peptide sequence
QVQLVQSGFELKKPGASVKISCKASGYAFTTYGMSWVRQAPGQGLEWMGWVNTYSGVPTYAQAFTGRFVFSLDTSVSTAYLQISSLKAEDTAVYYCARGPYAMDYWGQGTLVTVSSASTKGPSVFPLAPSSKSTSGGTAALGCLVKDYFPEPVTVSWNSGALTSGVHTFPAVLQSSGLYSLSSVVTVPSSSLGTQTYICNVNHKPSNTKVDKKVEPKSCDKTHTCPPCPAPELLGGPSVFLFPPKPKDTLMISRTPEVTCVVVDVSHEDPEVKFNWYVDGVEVHNAKTKPREEQYNSTYRVVSVLTVLHQDWLNGKEYKCKVSNKALPAPIEKTISKAKGQPREPQVYTLPPSREEMTKNQVSLTCLVKGFYPSDIAVEWESNGQPENNYKTTPPVLDSDGSFFLYSKLTVDKSRWQQGNVFSCSVMHEALHNHYTQKSLSLSPG

SEQ ID NO: 1191 - protein, 445 aa, synthetic construct
  REGION 1..445: note = 20H5.A3_hVH5VL1-hIgG1 (LALAPGv2) heavy chain peptide sequence
QVQLVQSGFELKKPGASVKISCKASGYAFTTYGMSWVRQAPGQGLEWMGWVNTYSGVPTYAQAFTGRFVFSLDTSVSTAYLQISSLKAEDTAVYYCARGPYAMDYWGQGTLVTVSSASTKGPSVFPLAPSSKSTSGGTAALGCLVKDYFPEPVTVSWNSGALTSGVHTFPAVLQSSGLYSLSSVVTVPSSSLGTQTYICNVNHKPSNTKVDKKVEPKSCDKTHTCPPCPAPEAAGGPSVFLFPPKPKDTLMISRTPEVTCVVVDVSHEDPEVKFNWYVDGVEVHNAKTKPREEQYNSTYRVVSVLTVLHQDWLNGKEYKCKVSNKALGAPIEKTISKAKGQPREPQVYTLPPSREEMTKNQVSLTCLVKGFYPSDIAVEWESNGQPENNYKTTPPVLDSDGSFFLYSKLTVDKSRWQQGNVFSCSVMHEALHNHYTQKSLSLSPG

SEQ ID NO: 1192 - protein, 445 aa, synthetic construct
  REGION 1..445: note = 20H5.A3_hVH5VL1-hIgG1 (REM) heavy chain peptide sequence
QVQLVQSGFELKKPGASVKISCKASGYAFTTYGMSWVRQAPGQGLEWMGWVNTYSGVPTYAQAFTGRFVFSLDTSVSTAYLQISSLKAEDTAVYYCARGPYAMDYWGQGTLVTVSSASTKGPSVFPLAPSSKSTSGGTAALGCLVKDYFPEPVTVSWNSGALTSGVHTFPAVLQSSGLYSLSSVVTVPSSSLGTQTYICNVNHKPSNTKVDKRVEPKSCDKTHTCPPCPAPELLGGPSVFLFPPKPKDTLMISRTPEVTCVVVDVSHEDPEVKFNWYVDGVEVHNAKTKPREEQYNSTYRVVSVLTVLHQDWLNGKEYKCKVSNKALPAPIEKTISKAKGQPREPQVYTLPPSREEMTKNQVSLTCLVKGFYPSDIAVEWESNGQPENNYKTTPPVLDSDGSFFLYSKLTVDKSRWQQGNVFSCSVMHEALHNHYTQKSLSLSPG

SEQ ID NO: 1193 - protein, 445 aa, synthetic construct
  REGION 1..445: note = 20H5.A3_hVH6VL1-hIgG1 (KEMv2) heavy chain peptide sequence
QVQLVQSGFELKKPGASVKISCKASGYAFTTYGMSWVRQAPGQGLEWMGWVNTYSGVPTSAQAFTGRFVFSLDTSVSTAYLQISSLKAEDTAVYYCARGPYAMDYWGQGTLVTVSSASTKGPSVFPLAPSSKSTSGGTAALGCLVKDYFPEPVTVSWNSGALTSGVHTFPAVLQSSGLYSLSSVVTVPSSSLGTQTYICNVNHKPSNTKVDKKVEPKSCDKTHTCPPCPAPELLGGPSVFLFPPKPKDTLMISRTPEVTCVVVDVSHEDPEVKFNWYVDGVEVHNAKTKPREEQYNSTYRVVSVLTVLHQDWLNGKEYKCKVSNKALPAPIEKTISKAKGQPREPQVYTLPPSREEMTKNQVSLTCLVKGFYPSDIAVEWESNGQPENNYKTTPPVLDSDGSFFLYSKLTVDKSRWQQGNVFSCSVMHEALHNHYTQKSLSLSPG

SEQ ID NO: 1194 - protein, 445 aa, synthetic construct
  REGION 1..445: note = 20H5.A3_hVH6VL1-hIgG1 (LALAPGv2) heavy chain peptide sequence
QVQLVQSGFELKKPGASVKISCKASGYAFTTYGMSWVRQAPGQGLEWMGWVNTYSGVPTSAQAFTGRFVFSLDTSVSTAYLQISSLKAEDTAVYYCARGPYAMDYWGQGTLVTVSSASTKGPSVFPLAPSSKSTSGGTAALGCLVKDYFPEPVTVSWNSGALTSGVHTFPAVLQSSGLYSLSSVVTVPSSSLGTQTYICNVNHKPSNTKVDKKVEPKSCDKTHTCPPCPAPEAAGGPSVFLFPPKPKDTLMISRTPEVTCVVVDVSHEDPEVKFNWYVDGVEVHNAKTKPREEQYNSTYRVVSVLTVLHQDWLNGKEYKCKVSNKALGAPIEKTISKAKGQPREPQVYTLPPSREEMTKNQVSLTCLVKGFYPSDIAVEWESNGQPENNYKTTPPVLDSDGSFFLYSKLTVDKSRWQQGNVFSCSVMHEALHNHYTQKSLSLSPG

SEQ ID NO: 1195 - protein, 445 aa, synthetic construct
  REGION 1..445: note = 20H5.A3_hVH6VL1-hIgG1 (REM) heavy chain peptide sequence
QVQLVQSGFELKKPGASVKISCKASGYAFTTYGMSWVRQAPGQGLEWMGWVNTYSGVPTSAQAFTGRFVFSLDTSVSTAYLQISSLKAEDTAVYYCARGPYAMDYWGQGTLVTVSSASTKGPSVFPLAPSSKSTSGGTAALGCLVKDYFPEPVTVSWNSGALTSGVHTFPAVLQSSGLYSLSSVVTVPSSSLGTQTYICNVNHKPSNTKVDKRVEPKSCDKTHTCPPCPAPELLGGPSVFLFPPKPKDTLMISRTPEVTCVVVDVSHEDPEVKFNWYVDGVEVHNAKTKPREEQYNSTYRVVSVLTVLHQDWLNGKEYKCKVSNKALPAPIEKTISKAKGQPREPQVYTLPPSREEMTKNQVSLTCLVKGFYPSDIAVEWESNGQPENNYKTTPPVLDSDGSFFLYSKLTVDKSRWQQGNVFSCSVMHEALHNHYTQKSLSLSPG

SEQ ID NO: 1196 - protein, 214 aa, synthetic construct
  REGION 1..214: note = 20H5.A3-hIgG4 (S228P) light chain peptide sequence
DIQMTQTTSSLSASLGDRVTINCSASQDISNYLNWYQQKPDGTVKLLIYYTSSLLSGVPSRFSGSGSGTDYSLTISNLEPEDIATYFCQQYSKLPYTFGSGTHLEIKRTVAAPSVFIFPPSDEQLKSGTASVVCLLNNFYPREAKVQWKVDNALQSGNSQESVTEQDSKDSTYSLSSTLTLSKADYEKHKVYACEVTHQGLSSPVTKSFNRGEC

SEQ ID NO: 1197 - protein, 214 aa, synthetic construct
  REGION 1..214: note = 20H5.A3-hIgG4 (S28P)-mv2 light chain peptide sequence
DIQMTQTTSSLSASLGDRVTINCSASQDISNYLNWYQQKPDGTVKLLIYYTSSLLSGVPSRFSGSGSGTDYSLTISNLEPEDIATYFCQQYSKLPYTFGSGTKLEIKRTVAAPSVFIFPPSDEQLKSGTASVVCLLNNFYPREAKVQWKVDNALQSGNSQESVTEQDSKDSTYSLSSTLTLSKADYEKHKVYACEVTHQGLSSPVTKSFNRGEC

SEQ ID NO: 1198 - protein, 214 aa, synthetic construct
  REGION 1..214: note = 798-9.20H5.A3-mH0mL1 light chain peptide sequence
DIQMTQTTSSLSASLGDRVTISCSASQDISNYLNWYQQKPDGTVKLLIYYTSSLLSGVPSRFSGSGSGTDYSLTISNLEPEDIATYFCQQYSKLPYTFGSGTHLEIKRTVAAPSVFIFPPSDEQLKSGTASVVCLLNNFYPREAKVQWKVDNALQSGNSQESVTEQDSKDSTYSLSSTLTLSKADYEKHKVYACEVTHQGLSSPVTKSFNRGEC

SEQ ID NO: 1199 - protein, 214 aa, synthetic construct; identical to SEQ ID NO: 1196
  REGION 1..214: note = 798-9.20H5.A3-mH1mL0 light chain peptide sequence

SEQ ID NO: 1200 - protein, 214 aa, synthetic construct; identical to SEQ ID NO: 1198
  REGION 1..214: note = 798-9.20H5.A3-mH1mL1 light chain peptide sequence

SEQ ID NO: 1201 - protein, 214 aa, synthetic construct; identical to SEQ ID NO: 1196
  REGION 1..214: note = 798-9.20H5.A3-mH2mL0 light chain peptide sequence

SEQ ID NO: 1202 - protein, 214 aa, synthetic construct; identical to SEQ ID NO: 1198
  REGION 1..214: note = 798-9.20H5.A3-mH2mL1 light chain peptide sequence

SEQ ID NO: 1203 - protein, 214 aa, synthetic construct; identical to SEQ ID NO: 859
  REGION 1..214: note = 20H5.A3-VH1VL1 light chain peptide sequence

SEQ ID NO: 1204 - protein, 214 aa, synthetic construct
  REGION 1..214: note = 20H5.A3-VH1VL2 light chain peptide sequence
DIQMTQSPSSLSASVGDRVTITCSASQDISNYLNWYQQKPGKAPKLLIYYTSSLLTGVPSRFSGSGSGTDYTFTISSLQPEDIATYFCQQYSKLPYTFGQGTKLEIKRTVAAPSVFIFPPSDEQLKSGTASVVCLLNNFYPREAKVQWKVDNALQSGNSQESVTEQDSKDSTYSLSSTLTLSKADYEKHKVYACEVTHQGLSSPVTKSFNRGEC

SEQ ID NO: 1205 - protein, 214 aa, synthetic construct; identical to SEQ ID NO: 860
  REGION 1..214: note = 20H5.A3-VH1VL3 light chain peptide sequence

SEQ ID NO: 1206 - protein, 214 aa, synthetic construct
  REGION 1..214: note = 20H5.A3-VH1VL4 light chain peptide sequence
DIQMTQSPSSLSASVGDRVTITCSASQDISNYLNWYQQKPGKAPKLLIYYTSSLLSGVPSRFSGSGSGTDYTLTISSLQPEDFATYFCQQYSKLPYTFGQGTKLEIKRTVAAPSVFIFPPSDEQLKSGTASVVCLLNNFYPREAKVQWKVDNALQSGNSQESVTEQDSKDSTYSLSSTLTLSKADYEKHKVYACEVTHQGLSSPVTKSFNRGEC

SEQ ID NO: 1207 - protein, 214 aa, synthetic construct
  REGION 1..214: note = 20H5.A3-VH1VL5 light chain peptide sequence
DIQMTQSPSSLSASVGDRVTINCSASQDISNYLNWYQQKPGKAPKLLIYYTSSLLTGVPSRFSGSGSGTDYTFTISSLQPEDIATYFCQQYSKLPYTFGQGTKLEIKRTVAAPSVFIFPPSDEQLKSGTASVVCLLNNFYPREAKVQWKVDNALQSGNSQESVTEQDSKDSTYSLSSTLTLSKADYEKHKVYACEVTHQGLSSPVTKSFNRGEC

SEQ ID NO: 1208 - protein, 214 aa, synthetic construct
  REGION 1..214: note = 20H5.A3-VH1VL6 light chain peptide sequence
DIQMTQSPSSLSASVGDRVTINCSASQDISNYLNWYQQKPGKAPKLLIYYTSSLLSGVPSRFSGSGSGTDYTLTISSLQPEDFATYFCQQYSKLPYTFGQGTKLEIKRTVAAPSVFIFPPSDEQLKSGTASVVCLLNNFYPREAKVQWKVDNALQSGNSQESVTEQDSKDSTYSLSSTLTLSKADYEKHKVYACEVTHQGLSSPVTKSFNRGEC

SEQ ID NO: 1209 - protein, 214 aa, synthetic construct; identical to SEQ ID NO: 860
  REGION 1..214: note = 20H5.A3-VH2VL3 light chain peptide sequence

SEQ ID NO: 1210 - protein, 214 aa, synthetic construct; identical to SEQ ID NO: 1206
  REGION 1..214: note = 20H5.A3-VH2VL4 light chain peptide sequence

SEQ ID NO: 1211 - protein, 214 aa, synthetic construct; identical to SEQ ID NO: 1207
  REGION 1..214: note = 20H5.A3-VH2VL5 light chain peptide sequence

SEQ ID NO: 1212 - protein, 214 aa, synthetic construct; identical to SEQ ID NO: 1208
  REGION 1..214: note = 20H5.A3-VH2VL6 light chain peptide sequence

SEQ ID NO: 1213 - protein, 214 aa, synthetic construct; identical to SEQ ID NO: 1207
  REGION 1..214: note = 20H5.A3-VH3VL5 light chain peptide sequence

SEQ ID NO: 1214 - protein, 214 aa, synthetic construct; identical to SEQ ID NO: 1208
  REGION 1..214: note = 20H5.A3-VH3VL6 light chain peptide sequence

SEQ ID NO: 1215 - protein, 214 aa, synthetic construct; identical to SEQ ID NO: 860
  REGION 1..214: note = 20H5.A3-VH4VL3 light chain peptide sequence

SEQ ID NO: 1216 - protein, 214 aa, synthetic construct; identical to SEQ ID NO: 1206
  REGION 1..214: note = 20H5.A3-VH4VL4 light chain peptide sequence

SEQ ID NO: 1217 - protein, 214 aa, synthetic construct; identical to SEQ ID NO: 1207
  REGION 1..214: note = 20H5.A3-VH4VL5 light chain peptide sequence

SEQ ID NO: 1218 - protein, 214 aa, synthetic construct; identical to SEQ ID NO: 1208
  REGION 1..214: note = 20H5.A3-VH4VL6 light chain peptide sequence

SEQ ID NO: 1219 - protein, 214 aa, synthetic construct; identical to SEQ ID NO: 1207
  REGION 1..214: note = 20H5.A3-VH5VL5 light chain peptide sequence

SEQ ID NO: 1220 - protein, 214 aa, synthetic construct; identical to SEQ ID NO: 1208
  REGION 1..214: note = 20H5.A3-VH5VL6 light chain peptide sequence

SEQ ID NO: 1221 - protein, 214 aa, synthetic construct; identical to SEQ ID NO: 1206
  REGION 1..214: note = 20H5.A3-VH6VL4 light chain peptide sequence

SEQ ID NO: 1222 - protein, 214 aa, synthetic construct; identical to SEQ ID NO: 1207
  REGION 1..214: note = 20H5.A3-VH6VL5 light chain peptide sequence

SEQ ID NO: 1223 - protein, 214 aa, synthetic construct; identical to SEQ ID NO: 1208
  REGION 1..214: note = 20H5.A3-VH6VL6 light chain peptide sequence

SEQ ID NO: 1224 - protein, 214 aa, synthetic construct; identical to SEQ ID NO: 859
  REGION 1..214: note = 20H5.A3-VH7VL1 light chain peptide sequence

SEQ ID NO: 1225 - protein, 214 aa, synthetic construct; identical to SEQ ID NO: 1204
  REGION 1..214: note = 20H5.A3-VH7VL2 light chain peptide sequence

SEQ ID NO: 1226 - protein, 214 aa, synthetic construct; identical to SEQ ID NO: 860
  REGION 1..214: note = 20H5.A3-VH7VL3 light chain peptide sequence

SEQ ID NO: 1227 - protein, 214 aa, synthetic construct; identical to SEQ ID NO: 1206
  REGION 1..214: note = 20H5.A3-VH7VL4 light chain peptide sequence

SEQ ID NO: 1228 - protein, 214 aa, synthetic construct; identical to SEQ ID NO: 1207
  REGION 1..214: note = 20H5.A3-VH7VL5 light chain peptide sequence

SEQ ID NO: 1229 - protein, 214 aa, synthetic construct; identical to SEQ ID NO: 1208
  REGION 1..214: note = 20H5.A3-VH7VL6 light chain peptide sequence

SEQ ID NO: 1230 - protein, 214 aa, synthetic construct; identical to SEQ ID NO: 859
  REGION 1..214: note = 20H5.A3_hVH3VL1-hIgG1 (KEMv2) light chain peptide sequence

SEQ ID NO: 1231 - protein, 214 aa, synthetic construct; identical to SEQ ID NO: 859
  REGION 1..214: note = 20H5.A3_hVH3VL1-hIgG1 (LALAPGv2) light chain peptide sequence

SEQ ID NO: 1232 - protein, 214 aa, synthetic construct; identical to SEQ ID NO: 859
  REGION 1..214: note = 20H5.A3_hVH3VL1-hIgG1 (REM) light chain peptide sequence

SEQ ID NO: 1233 - protein, 214 aa, synthetic construct; identical to SEQ ID NO: 859
  REGION 1..214: note = 20H5.A3_hVH5VL1-hIgG1 (KEMv2) light chain peptide sequence

SEQ ID NO: 1234 - protein, 214 aa, synthetic construct; identical to SEQ ID NO: 859
  REGION 1..214: note = 20H5.A3_hVH5VL1-hIgG1 (LALAPGv2) light chain peptide sequence

SEQ ID NO: 1235 - protein, 214 aa, synthetic construct; identical to SEQ ID NO: 859
  REGION 1..214: note = 20H5.A3_hVH5VL1-hIgG1 (REM) light chain peptide sequence

SEQ ID NO: 1236 - protein, 214 aa, synthetic construct; identical to SEQ ID NO: 859
  REGION 1..214: note = 20H5.A3_hVH6VL1-hIgG1 (KEMv2) light chain peptide sequence

SEQ ID NO: 1237 - protein, 214 aa, synthetic construct; identical to SEQ ID NO: 859
  REGION 1..214: note = 20H5.A3_hVH6VL1-hIgG1 (LALAPGv2) light chain peptide sequence

SEQ ID NO: 1238 - protein, 214 aa, synthetic construct; identical to SEQ ID NO: 859
  REGION 1..214: note = 20H5.A3_hVH6VL1-hIgG1 (REM) light chain peptide sequence

SEQ ID NO: 1239 - DNA, 348 bp, synthetic construct; identical to SEQ ID NO: 547
  misc_feature 1..348: note = 20H5.A3-hIgG4 (S228P) VH DNA sequence
  source 1..348: mol_type = other DNA

SEQ ID NO: 1240 - DNA, 348 bp, synthetic construct; identical to SEQ ID NO: 547
  misc_feature 1..348: note = 20H5.A3-hIgG4 (S28P)-mv2 VH DNA sequence
  source 1..348: mol_type = other DNA

SEQ ID NO: 1241 - DNA, 348 bp, synthetic construct; identical to SEQ ID NO: 547
  misc_feature 1..348: note = 798-9.20H5.A3-mH0mL1 VH DNA sequence
  source 1..348: mol_type = other DNA

SEQ ID NO: 1242 - DNA, 348 bp, synthetic construct
  misc_feature 1..348: note = 798-9.20H5.A3-mH1mL0 VH DNA sequence
  source 1..348: mol_type = other DNA
cagatccagttggtacagtctggacctgagctgaagaagcctggagagtcagtcaagatctcctgcaaggcttctggttatgccttcacaacctatggaatgagctgggtgcaacaggctccaggaaagggtttaaagtggatgggctgggtaaacacctactctggagtgccaacatatgctgatgacttcaagggacggtttgccttctctttggaaacctctgccagcactgcctatttgcagatcaacaacctcagaaatgaggacacggctacatatttctgtgcaagagggccctatgctatggactactggggtcaaggaacctcagtcaccgtctcctca

SEQ ID NO: 1243 - DNA, 348 bp, synthetic construct; identical to SEQ ID NO: 1242
  misc_feature 1..348: note = 798-9.20H5.A3-mH1mL1 VH DNA sequence
  source 1..348: mol_type = other DNA

SEQ ID NO: 1244 - DNA, 348 bp, synthetic construct
  misc_feature 1..348: note = 798-9.20H5.A3-mH2mL0 VH DNA sequence
  source 1..348: mol_type = other DNA
cagatccagttggtacagtctggacctgagctgaagaagcctggagagtcagtcaagatctcctgcaaggcttctggttatgccttcacaacctatggaatgagctgggtgcaacaggctccaggaaagggtttaaagtggatgggctgggtaaacacctactctggagtgccaacaagtgctgatgacttcaagggacggtttgccttctctttggaaacctctgccagcactgcctatttgcagatcaacaacctcagaaatgaggacacggctacatatttctgtgcaagagggccctatgctatggactactggggtcaaggaacctcagtcaccgtctcctca

SEQ ID NO: 1245 - DNA, 348 bp, synthetic construct; identical to SEQ ID NO: 1244
  misc_feature 1..348: note = 798-9.20H5.A3-mH2mL1 VH DNA sequence
  source 1..348: mol_type = other DNA

SEQ ID NO: 1246 - DNA, 348 bp, synthetic construct
  misc_feature 1..348: note = 20H5.A3-VH1VL1 VH DNA sequence
  source 1..348: mol_type = other DNA
caggtgcagctcgtccagtctggctccgagttgaagaaacccggcgcctctgtgaaagtttcctgcaaagccagtggatatgcctttaccacgtacgggatgtcctgggttcgccaggcccccggacaggggttggagtggatgggctgggtgaacacatattctggagtaccaacctatgctcagggattcaccgggcggtttgttttcagcctcgatacaagtgttagcacagcctacctgcagatctcttcccttaaggccgaggatactgcagtgtactactgtgcccgtgggccgtacgcaatggactactggggccagggaacccttgtgactgtgagctct

SEQ ID NO: 1247 - DNA, 348 bp, synthetic construct; identical to SEQ ID NO: 1246
  misc_feature 1..348: note = 20H5.A3-VH1VL2 VH DNA sequence
  source 1..348: mol_type = other DNA

SEQ ID NO: 1248 - DNA, 348 bp, synthetic construct; identical to SEQ ID NO: 1246
  misc_feature 1..348: note = 20H5.A3-VH1VL3 VH DNA sequence
  source 1..348: mol_type = other DNA

SEQ ID NO: 1249 - DNA, 348 bp, synthetic construct; identical to SEQ ID NO: 1246
  misc_feature 1..348: note = 20H5.A3-VH1VL4 VH DNA sequence
  source 1..348: mol_type = other DNA

SEQ ID NO: 1250 - DNA, 348 bp, synthetic construct; identical to SEQ ID NO: 1246
  misc_feature 1..348: note = 20H5.A3-VH1VL5 VH DNA sequence
  source 1..348: mol_type = other DNA

SEQ ID NO: 1251 - DNA, 348 bp, synthetic construct; identical to SEQ ID NO: 1246
  misc_feature 1..348: note = 20H5.A3-VH1VL6 VH DNA sequence
  source 1..348: mol_type = other DNA

SEQ ID NO: 1252 - DNA, 348 bp, synthetic construct
  misc_feature 1..348: note = 20H5.A3-VH2VL3 VH DNA sequence
  source 1..348: mol_type = other DNA
caagtgcagctagtgcagagtggctccgaactgaagaagccaggcgcttcagtgaaggtaagttgcaaggctagcggttacgcttttacaacctacggcatgtcatgggtgagacaagccccaggacaggggctagaatggatgggctgggttaacacatacagtggcgtgcccacttccgcccagggctttaccggccgtttcgttttcagtctggataccagcgtctctaccgcatacctccaaattagttctttgaaggcagaggataccgctgtttactattgcgccaggggcccgtacgctatggactactggggccaggggacactggtcaccgtcagcagt

SEQ ID NO: 1253 - DNA, 348 bp, synthetic construct; identical to SEQ ID NO: 1252
  misc_feature 1..348: note = 20H5.A3-VH2VL4 VH DNA sequence
  source 1..348: mol_type = other DNA

SEQ ID NO: 1254 - DNA, 348 bp, synthetic construct; identical to SEQ ID NO: 1252
  misc_feature 1..348: note = 20H5.A3-VH2VL5 VH DNA sequence
  source 1..348: mol_type = other DNA

SEQ ID NO: 1255 - DNA, 348 bp, synthetic construct; identical to SEQ ID NO: 1252
  misc_feature 1..348: note = 20H5.A3-VH2VL6 VH DNA sequence
  source 1..348: mol_type = other DNA

SEQ ID NO: 1256 - DNA, 348 bp, synthetic construct; identical to SEQ ID NO: 874
  misc_feature 1..348: note = 20H5.A3-VH3VL5 VH DNA sequence
  source 1..348: mol_type = other DNA

SEQ ID NO: 1257 - DNA, 348 bp, synthetic construct; identical to SEQ ID NO: 874
  misc_feature 1..348: note = 20H5.A3-VH3VL6 VH DNA sequence
  source 1..348: mol_type = other DNA

SEQ ID NO: 1258 - DNA, 348 bp, synthetic construct; identical to SEQ ID NO: 876
  misc_feature 1..348: note = 20H5.A3-VH4VL3 VH DNA sequence
  source 1..348: mol_type = other DNA

SEQ ID NO: 1259 - DNA, 348 bp, synthetic construct; identical to SEQ ID NO: 876
  misc_feature 1..348: note = 20H5.A3-VH4VL4 VH DNA sequence
  source 1..348: mol_type = other DNA

SEQ ID NO: 1260 - DNA, 348 bp, synthetic construct; identical to SEQ ID NO: 876
  misc_feature 1..348: note = 20H5.A3-VH4VL5 VH DNA sequence
  source 1..348: mol_type = other DNA

SEQ ID NO: 1261 - DNA, 348 bp, synthetic construct; identical to SEQ ID NO: 876
  misc_feature 1..348: note = 20H5.A3-VH4VL6 VH DNA sequence
  source 1..348: mol_type = other DNA

SEQ ID NO: 1262 - DNA, 348 bp, synthetic construct; identical to SEQ ID NO: 877
  misc_feature 1..348: note = 20H5.A3-VH5VL5 VH DNA sequence
  source 1..348: mol_type = other DNA

SEQ ID NO: 1263 - DNA, 348 bp, synthetic construct; identical to SEQ ID NO: 877
  misc_feature 1..348: note = 20H5.A3-VH5VL6 VH DNA sequence
  source 1..348: mol_type = other DNA

SEQ ID NO: 1264 - DNA, 348 bp, synthetic construct; identical to SEQ ID NO: 879
  misc_feature 1..348: note = 20H5.A3-VH6VL4 VH DNA sequence
  source 1..348: mol_type = other DNA

SEQ ID NO: 1265 - DNA, 348 bp, synthetic construct; identical to SEQ ID NO: 879
  misc_feature 1..348: note = 20H5.A3-VH6VL5 VH DNA sequence
  source 1..348: mol_type = other DNA

SEQ ID NO: 1266 - DNA, 348 bp, synthetic construct; identical to SEQ ID NO: 879
  misc_feature 1..348: note = 20H5.A3-VH6VL6 VH DNA sequence
  source 1..348: mol_type = other DNA

SEQ ID NO: 1267 - DNA, 348 bp, synthetic construct
  misc_feature 1..348: note = 20H5.A3-VH7VL1 VH DNA sequence
  source 1..348: mol_type = other DNA
cagattcagcttgtacagagtgggttcgaactgaagaagcccggggcctctgttaagatcagttgtaaagccagtggctacgccttcactacctacggaatgtcttgggtacggcaagcccccggacaagggctggaatggatgggctgggtaaacacatatagtggagtgcccacatatgccgatgcctttacaggccggttcgtattctctctggacacttccgtttctactgcctacctgcaaatctcttctctgaaggcagaagacacagctgtttacttttgtgctaggggtccctatgctatggattattgggggcagggcacactagtcacagtctcctca

SEQ ID NO: 1268 - DNA, 348 bp, synthetic construct; identical to SEQ ID NO: 1267
  misc_feature 1..348: note = 20H5.A3-VH7VL2 VH DNA sequence
  source 1..348: mol_type = other DNA

SEQ ID NO: 1269 - DNA, 348 bp, synthetic construct; identical to SEQ ID NO: 1267
  misc_feature 1..348: note = 20H5.A3-VH7VL3 VH DNA sequence
  source 1..348: mol_type = other DNA

SEQ ID NO: 1270 - DNA, 348 bp, synthetic construct; identical to SEQ ID NO: 1267
  misc_feature 1..348: note = 20H5.A3-VH7VL4 VH DNA sequence
  source 1..348: mol_type = other DNA

SEQ ID NO: 1271 - DNA, 348 bp, synthetic construct; identical to SEQ ID NO: 1267
  misc_feature 1..348: note = 20H5.A3-VH7VL5 VH DNA sequence
  source 1..348: mol_type = other DNA

SEQ ID NO: 1272 - DNA, 348 bp, synthetic construct; identical to SEQ ID NO: 1267
  misc_feature 1..348: note = 20H5.A3-VH7VL6 VH DNA sequence
  source 1..348: mol_type = other DNA

SEQ ID NO: 1273 - DNA, 348 bp, synthetic construct; identical to SEQ ID NO: 874
  misc_feature 1..348: note = 20H5.A3_hVH3VL1-hIgG1 (KEMv2) VH DNA sequence
  source 1..348: mol_type = other DNA

SEQ ID NO: 1274 - DNA, 348 bp, synthetic construct; identical to SEQ ID NO: 874
  misc_feature 1..348: note = 20H5.A3_hVH3VL1-hIgG1 (LALAPGv2) VH DNA sequence
  source 1..348: mol_type = other DNA

SEQ ID NO: 1275 - DNA, 348 bp, synthetic construct; identical to SEQ ID NO: 874
  misc_feature 1..348: note = 20H5.A3_hVH3VL1-hIgG1 (REM) VH DNA sequence
  source 1..348: mol_type = other DNA

SEQ ID NO: 1276 - DNA, 348 bp, synthetic construct; identical to SEQ ID NO: 877
  misc_feature 1..348: note = 20H5.A3_hVH5VL1-hIgG1 (KEMv2) VH DNA sequence
  source 1..348: mol_type = other DNA

SEQ ID NO: 1277 - DNA, 348 bp, synthetic construct; identical to SEQ ID NO: 877
  misc_feature 1..348: note = 20H5.A3_hVH5VL1-hIgG1 (LALAPGv2) VH DNA sequence
  source 1..348: mol_type = other DNA

SEQ ID NO: 1278 - DNA, 348 bp, synthetic construct; identical to SEQ ID NO: 877
  misc_feature 1..348: note = 20H5.A3_hVH5VL1-hIgG1 (REM) VH DNA sequence
  source 1..348: mol_type = other DNA

SEQ ID NO: 1279 - DNA, 348 bp, synthetic construct; identical to SEQ ID NO: 879
  misc_feature 1..348: note = 20H5.A3_hVH6VL1-hIgG1 (KEMv2) VH DNA sequence
  source 1..348: mol_type = other DNA

SEQ ID NO: 1280 - DNA, 348 bp, synthetic construct; identical to SEQ ID NO: 879
  misc_feature 1..348: note = 20H5.A3_hVH6VL1-hIgG1 (LALAPGv2) VH DNA sequence
  source 1..348: mol_type = other DNA

SEQ ID NO: 1281 - DNA, 348 bp, synthetic construct; identical to SEQ ID NO: 879
  misc_feature 1..348: note = 20H5.A3_hVH6VL1-hIgG1 (REM) VH DNA sequence
  source 1..348: mol_type = other DNA

SEQ ID NO: 1282 - DNA, 321 bp, synthetic construct; identical to SEQ ID NO: 629
  misc_feature 1..321: note = 20H5.A3-hIgG4 (S228P) VL DNA sequence
  source 1..321: mol_type = other DNA

SEQ ID NO: 1283 - DNA, 321 bp, synthetic construct
  misc_feature 1..321: note = 20H5.A3-hIgG4 (S28P)-mv2 VL DNA sequence
  source 1..321: mol_type = other DNA
gatatccagatgacacagactacatcctccctgtctgcctctctgggagacagagtcaccatcaattgcagtgcaagtcaggacattagcaattatttaaactggtatcagcagaaaccagatggaactgttaaactcctgatctattacacatcaagtttactctcaggagtcccatcaaggttcagtggcagtgggtctgggacagattattctctcaccatcagcaacctggaacctgaagatattgccacttacttttgtcagcaatatagtaagcttccctatacgttcggatcggggaccaaactggaaataaaa

SEQ ID NO: 1284 - DNA, 321 bp, synthetic construct
  misc_feature 1..321: note = 798-9.20H5.A3-mH0mL1 VL DNA sequence
  source 1..321: mol_type = other DNA
gatatccagatgacacagactacatcctccctgtctgcctctctgggagacagagtcaccatcagttgcagtgcaagtcaggacattagcaattatttaaactggtatcagcagaaaccagatggaactgttaaactcctgatctattacacatcaagtttactctcaggagtcccatcaaggttcagtggcagtgggtctgggacagattattctctcaccatcagcaacctggaacctgaagatattgccacttacttttgtcagcaatatagtaagcttccctatacgttcggatcggggacccacctggaaataaaa

SEQ ID NO: 1285 - DNA, 321 bp, synthetic construct
  misc_feature 1..321: note = 798-9.20H5.A3-mH1mL0 VL DNA sequence
  source 1..321: mol_type = other DNA
gatatccagatgacccagaccacaagctctctgtccgctagccttggagacagagtgaccatcaactgcagtgcaagccaggatatctccaactacctgaattggtaccagcagaagcctgacggtacggtgaaacttctaatatactacacttcatctctgctgtctggggtgcccagtaggttcagcggtagcggttcagggactgattattcacttacgatatcaaacctggaacccgaggacattgccacttacttctgccagcagtacagtaagttgccttatacattcggtagtggaactcaccttgagattaaa

SEQ ID NO: 1286 - DNA, 321 bp, synthetic construct; identical to SEQ ID NO: 1284
  misc_feature 1..321: note = 798-9.20H5.A3-mH1mL1 VL DNA sequence
  source 1..321: mol_type = other DNA

SEQ ID NO: 1287 - DNA, 321 bp, synthetic construct; identical to SEQ ID NO: 1285
  misc_feature 1..321: note = 798-9.20H5.A3-mH2mL0 VL DNA sequence
  source 1..321: mol_type = other DNA

SEQ ID NO: 1288 - DNA, 321 bp, synthetic construct; identical to SEQ ID NO: 1284
  misc_feature 1..321: note = 798-9.20H5.A3-mH2mL1 VL DNA sequence
  source 1..321: mol_type = other DNA

SEQ ID NO: 1289 - DNA, 321 bp, synthetic construct; identical to SEQ ID NO: 889
  misc_feature 1..321: note = 20H5.A3-VH1VL1 VL DNA sequence
  source 1..321: mol_type = other DNA

SEQ ID NO: 1290 - DNA, 321 bp, synthetic construct
  misc_feature 1..321: note = 20H5.A3-VH1VL2 VL DNA sequence
  source 1..321: mol_type = other DNA
gacatccaaatgacacagagtcccagttcccttagtgcctccgtgggggaccgtgttactatcacatgctcagctagccaagacatatccaattacctaaattggtatcagcagaagcctggcaaagcacctaagctcctgatttattacacctcatccctgttgacgggggttcccagccggtttagcggtagtgggtcaggaacagactacaccttcactataagcagcctgcaacccgaggatattgctacttatttttgtcagcagtattccaagctgccttacacattcggtcagggcacaaagctggaaattaag

SEQ ID NO: 1291 - DNA, 321 bp, synthetic construct; identical to SEQ ID NO: 890
  misc_feature 1..321: note = 20H5.A3-VH1VL3 VL DNA sequence
  source 1..321: mol_type = other DNA

SEQ ID NO: 1292 - DNA, 321 bp, synthetic construct
  misc_feature 1..321: note = 20H5.A3-VH1VL4 VL DNA sequence
  source 1..321: mol_type = other DNA
gacattcaaatgacacagagcccctctagtttgtcagccagtgtcggagaccgggtgactattacatgctcagccagtcaagacatcagcaactatctaaattggtatcagcagaaacccgggaaggctcctaagctgctgatttattacacatctagcttgctgagcggggtcccgagtagattcagtggatccggttctgggacagactataccctcaccatctcatccctgcaaccagaggacttcgctacttacttctgccagcagtatagcaaacttccctacacatttggacaggggacaaaactggagattaaa

SEQ ID NO: 1293 - DNA, 321 bp, synthetic construct
  misc_feature 1..321: note = 20H5.A3-VH1VL5 VL DNA sequence
  source 1..321: mol_type = other DNA
gacatccaaatgacacagagtcccagttcccttagtgcctccgtgggggaccgtgttactatcaactgctcagctagccaagacatatccaattacctaaattggtatcagcagaagcctggcaaagcacctaagctcctgatttattacacctcatccctgttgacgggggttcccagccggtttagcggtagtgggtcaggaacagactacaccttcactataagcagcctgcaacccgaggatattgctacttatttttgtcagcagtattccaagctgccttacacattcggtcagggcacaaagctggaaattaag

SEQ ID NO: 1294 - DNA, 321 bp, synthetic construct
  misc_feature 1..321: note = 20H5.A3-VH1VL6 VL DNA sequence
  source 1..321: mol_type = other DNA
gacattcaaatgacacagagcccctctagtttgtcagccagtgtcggagaccgggtgactattaactgctcagccagtcaagacatcagcaactatctaaattggtatcagcagaaacccgggaaggctcctaagctgctgatttattacacatctagcttgctgagcggggtcccgagtagattcagtggatccggttctgggacagactataccctcaccatctcatccctgcaaccagaggacttcgctacttacttctgccagcagtatagcaaacttccctacacatttggacaggggacaaaactggagattaaa

SEQ ID NO: 1295 - DNA, 321 bp, synthetic construct; identical to SEQ ID NO: 890
  misc_feature 1..321: note = 20H5.A3-VH2VL3 VL DNA sequence
  source 1..321: mol_type = other DNA

SEQ ID NO: 1296 - DNA, 321 bp, synthetic construct; identical to SEQ ID NO: 1292
  misc_feature 1..321: note = 20H5.A3-VH2VL4 VL DNA sequence
  source 1..321: mol_type = other DNA

SEQ ID NO: 1297 - DNA, 321 bp, synthetic construct; identical to SEQ ID NO: 1293
  misc_feature 1..321: note = 20H5.A3-VH2VL5 VL DNA sequence
  source 1..321: mol_type = other DNA

SEQ ID NO: 1298 - DNA, 321 bp, synthetic construct; identical to SEQ ID NO: 1294
  misc_feature 1..321: note = 20H5.A3-VH2VL6 VL DNA sequence
  source 1..321: mol_type = other DNA

SEQ ID NO: 1299 - DNA, 321 bp, synthetic construct; identical to SEQ ID NO: 1293
  misc_feature 1..321: note = 20H5.A3-VH3VL5 VL DNA sequence
  source 1..321: mol_type = other DNA

SEQ ID NO: 1300 - DNA, 321 bp, synthetic construct; identical to SEQ ID NO: 1294
  misc_feature 1..321: note = 20H5.A3-VH3VL6 VL DNA sequence
  source 1..321: mol_type = other DNA

SEQ ID NO: 1301 - DNA, 321 bp, synthetic construct; identical to SEQ ID NO: 890
  misc_feature 1..321: note = 20H5.A3-VH4VL3 VL DNA sequence
  source 1..321: mol_type = other DNA

SEQ ID NO: 1302 - DNA, 321 bp, synthetic construct; identical to SEQ ID NO: 1292
  misc_feature 1..321: note = 20H5.A3-VH4VL4 VL DNA sequence
  source 1..321: mol_type = other DNA

SEQ ID NO: 1303 - DNA, 321 bp, synthetic construct; identical to SEQ ID NO: 1293
  misc_feature 1..321: note = 20H5.A3-VH4VL5 VL DNA sequence
  source 1..321: mol_type = other DNA

SEQ ID NO: 1304 - DNA, 321 bp, synthetic construct; identical to SEQ ID NO: 1294
  misc_feature 1..321: note = 20H5.A3-VH4VL6 VL DNA sequence
  source 1..321: mol_type = other DNA

SEQ ID NO: 1305 - DNA, 321 bp, synthetic construct; identical to SEQ ID NO: 1293
  misc_feature 1..321: note = 20H5.A3-VH5VL5 VL DNA sequence
  source 1..321: mol_type = other DNA

SEQ ID NO: 1306 - DNA, 321 bp, synthetic construct; identical to SEQ ID NO: 1294
  misc_feature 1..321: note = 20H5.A3-VH5VL6 VL DNA sequence
  source 1..321: mol_type = other DNA

SEQ ID NO: 1307 - DNA, 321 bp, synthetic construct; identical to SEQ ID NO: 1292
  misc_feature 1..321: note = 20H5.A3-VH6VL4 VL DNA sequence
  source 1..321: mol_type = other DNA

SEQ ID NO: 1308 - DNA, 321 bp, synthetic construct; identical to SEQ ID NO: 1293
  misc_feature 1..321: note = 20H5.A3-VH6VL5 VL DNA sequence
  source 1..321: mol_type = other DNA

SEQ ID NO: 1309 - DNA, 321 bp, synthetic construct; identical to SEQ ID NO: 1292
  misc_feature 1..321: note = 20H5.A3-VH6VL6 VL DNA sequence
  source 1..321: mol_type = other DNA

SEQ ID NO: 1310 - DNA, 321 bp, synthetic construct; identical to SEQ ID NO: 889
  misc_feature 1..321: note = 20H5.A3-VH7VL1 VL DNA sequence
  source 1..321: mol_type = other DNA

SEQ ID NO: 1311 - DNA, 321 bp, synthetic construct; identical to SEQ ID NO: 1290
  misc_feature 1..321: note = 20H5.A3-VH7VL2 VL DNA sequence
  source 1..321: mol_type = other DNA

SEQ ID NO: 1312 - DNA, 321 bp, synthetic construct; identical to SEQ ID NO: 890
  misc_feature 1..321: note = 20H5.A3-VH7VL3 VL DNA sequence
  source 1..321: mol_type = other DNA

SEQ ID NO: 1313 - DNA, 321 bp, synthetic construct; identical to SEQ ID NO: 1292
  misc_feature 1..321: note = 20H5.A3-VH7VL4 VL DNA sequence
  source 1..321: mol_type = other DNA

SEQ ID NO: 1314 - DNA, 321 bp, synthetic construct; identical to SEQ ID NO: 1293
  misc_feature 1..321: note = 20H5.A3-VH7VL5 VL DNA sequence
  source 1..321: mol_type = other DNA

SEQ ID NO: 1315 - DNA, 321 bp, synthetic construct; identical to SEQ ID NO: 1293
  misc_feature 1..321: note = 20H5.A3-VH7VL6 VL DNA sequence
  source 1..321: mol_type = other DNA

SEQ ID NO: 1316 - DNA, 321 bp, synthetic construct; identical to SEQ ID NO: 889
  misc_feature 1..321: note = 20H5.A3_hVH3VL1-hIgG1 (KEMv2) VL DNA sequence
  source 1..321: mol_type = other DNA

SEQ ID NO: 1317 - DNA, 321 bp, synthetic construct; identical to SEQ ID NO: 889
  misc_feature 1..321: note = 20H5.A3_hVH3VL1-hIgG1 (LALAPGv2) VL DNA sequence
  source 1..321: mol_type = other DNA

SEQ ID NO: 1318 - DNA, 321 bp, synthetic construct; identical to SEQ ID NO: 889
  misc_feature 1..321: note = 20H5.A3_hVH3VL1-hIgG1 (REM) VL DNA sequence
  source 1..321: mol_type = other DNA

SEQ ID NO: 1319 - DNA, 321 bp, synthetic construct; identical to SEQ ID NO: 889
  misc_feature 1..321: note = 20H5.A3_hVH5VL1-hIgG1 (KEMv2) VL DNA sequence
  source 1..321: mol_type = other DNA

SEQ ID NO: 1320 - DNA, 321 bp, synthetic construct; identical to SEQ ID NO: 889
  misc_feature 1..321: note = 20H5.A3_hVH5VL1-hIgG1 (LALAPGv2) VL DNA sequence
  source 1..321: mol_type = other DNA

SEQ ID NO: 1321 - DNA, 321 bp, synthetic construct; identical to SEQ ID NO: 889
  misc_feature 1..321: note = 20H5.A3_hVH5VL1-hIgG1 (REM) VL DNA sequence
  source 1..321: mol_type = other DNA

SEQ ID NO: 1322 - DNA, 321 bp, synthetic construct; identical to SEQ ID NO: 889
  misc_feature 1..321: note = 20H5.A3_hVH6VL1-hIgG1 (KEMv2) VL DNA sequence
  source 1..321: mol_type = other DNA

SEQ ID NO: 1323 - DNA, 321 bp, synthetic construct; identical to SEQ ID NO: 889
  misc_feature 1..321: note = 20H5.A3_hVH6VL1-hIgG1 (LALAPGv2) VL DNA sequence
  source 1..321: mol_type = other DNA

SEQ ID NO: 1324 - DNA, 321 bp, synthetic construct; identical to SEQ ID NO: 889
  misc_feature 1..321: note = 20H5.A3_hVH6VL1-hIgG1 (REM) VL DNA sequence
  source 1..321: mol_type = other DNA

SEQ ID NO: 1325 - DNA, 1332 bp, synthetic construct
  misc_feature 1..1332: note = 20H5.A3-hIgG4 (S228P) heavy chain DNA sequence
  source 1..1332: mol_type = other DNA
cagatccagttggtacagtctggacctgagctgaagaagcctggagagtcagtcaagatctcctgcaaggcttctggttatgccttcacaacctatggaatgagctgggtgcaacaggctccaggaaagggtttaaagtggatgggctgggtaaacacctactctggagtgccaacatgtgctgatgacttcaagggacggtttgccttctctttggaaacctctgccagcactgcctatttgcagatcaacaacctcagaaatgaggacacggctacatatttctgtgcaagagggccctatgctatggactactggggtcaaggaacctcagtcaccgtctcctcagctagcaccaagggccccagcgtgtttcctctcgctccctgcagccggagcacatccgagagcaccgctgctctgggctgtctcgtgaaggactacttccctgaacccgtcaccgtcagctggaatagcggcgccctgacatccggcgtccacacattccccgctgtcctgcagagcagcggcctgtacagcctgagctccgtggtcaccgtgcctagcagcagcctgggaacaaagacctacacctgcaacgtggaccataagccctccaacaccaaggtggacaagcgggtggaatccaagtatggacccccctgtcctccttgccctgctcctgaatttctcggaggcccctccgtcttcctgtttccccccaagcccaaggacaccctgatgatctcccggacacccgaagtcacctgcgtcgtggtggatgtcagccaggaagatcccgaggtgcagttcaactggtacgtggacggagtggaggtgcataacgccaaaaccaagcccagggaagagcagttcaacagcacctatcgggtcgtgtccgtgctcaccgtcctgcatcaggattggctcaacggcaaggagtacaagtgcaaggtgtccaacaagggcctgccctcctccatcgagaagaccatctccaaggctaagggccaacctcgggagccccaagtgtataccctccctcccagccaggaggagatgaccaagaatcaagtgagcctgacctgcctcgtgaagggattttacccctccgacatcgctgtggaatgggaaagcaatggccaacctgagaacaactacaagaccacaccccccgtgctggactccgatggctccttcttcctgtacagcaggctgaccgtggacaaatcccggtggcaagagggaaacgtgttcagctgctccgtgatgcacgaggctctccacaaccactacacccagaagagcctctccctgagcctcggctagtaa

SEQ ID NO: 1326 - DNA, 1332 bp, synthetic construct; identical to SEQ ID NO: 1325
  misc_feature 1..1332: note = 20H5.A3-hIgG4 (S28P)-mv2 heavy chain DNA sequence
  source 1..1332: mol_type = other DNA

SEQ ID NO: 1327 - DNA, 1332 bp, synthetic construct; identical to SEQ ID NO: 1325
  misc_feature 1..1332: note = 798-9.20H5.A3-mH0mL1 heavy chain DNA sequence
  source 1..1332: mol_type = other DNA

SEQ ID NO: 1328 - DNA, 1332 bp, synthetic construct
  misc_feature 1..1332: note = 798-9.20H5.A3-mH1mL0 heavy chain DNA sequence
  source 1..1332: mol_type = other DNA
cagatccagttggtacagtctggacctgagctgaagaagcctggagagtcagtcaagatctcctgcaaggcttctggttatgccttcacaacctatggaatgagctgggtgcaacaggctccaggaaagggtttaaagtggatgggctgggtaaacacctactctggagtgccaacatatgctgatgacttcaagggacggtttgccttctctttggaaacctctgccagcactgcctatttgcagatcaacaacctcagaaatgaggacacggctacatatttctgtgcaagagggccctatgctatggactactggggtcaaggaacctcagtcaccgtctcctcagctagcaccaagggccccagcgtgtttcctctcgctccctgcagccggagcacatccgagagcaccgctgctctgggctgtctcgtgaaggactacttccctgaacccgtcaccgtcagctggaatagcggcgccctgacatccggcgtccacacattccccgctgtcctgcagagcagcggcctgtacagcctgagctccgtggtcaccgtgcctagcagcagcctgggaacaaagacctacacctgcaacgtggaccataagccctccaacaccaaggtggacaagcgggtggaatccaagtatggacccccctgtcctccttgccctgctcctgaatttctcggaggcccctccgtcttcctgtttccccccaagcccaaggacaccctgatgatctcccggacacccgaagtcacctgcgtcgtggtggatgtcagccaggaagatcccgaggtgcagttcaactggtacgtggacggagtggaggtgcataacgccaaaaccaagcccagggaagagcagttcaacagcacctatcgggtcgtgtccgtgctcaccgtcctgcatcaggattggctcaacggcaaggagtacaagtgcaaggtgtccaacaagggcctgccctcctccatcgagaagaccatctccaaggctaagggccaacctcgggagccccaagtgtataccctccctcccagccaggaggagatgaccaagaatcaagtgagcctgacctgcctcgtgaagggattttacccctccgacatcgctgtggaatgggaaagcaatggccaacctgagaacaactacaagaccacaccccccgtgctggactccgatggctccttcttcctgtacagcaggctgaccgtggacaaatcccggtggcaagagggaaacgtgttcagctgctccgtgatgcacgaggctctccacaaccactacacccagaagagcctctccctgagcctcggctagtaa

SEQ ID NO: 1329 - DNA, 1332 bp, synthetic construct; identical to SEQ ID NO: 1328
  misc_feature 1..1332: note = 798-9.20H5.A3-mH1mL1 heavy chain DNA sequence
  source 1..1332: mol_type = other DNA

SEQ ID NO: 1330 - DNA, 1332 bp, synthetic construct
  misc_feature 1..1332: note = 798-9.20H5.A3-mH2mL0 heavy chain DNA sequence
  source 1..1332: mol_type = other DNA
cagatccagttggtacagtctggacctgagctgaagaagcctggagagtcagtcaagatctcctgcaaggcttctggttatgccttcacaacctatggaatgagctgggtgcaacaggctccaggaaagggtttaaagtggatgggctgggtaaacacctactctggagtgccaacaagtgctgatgacttcaagggacggtttgccttctctttggaaacctctgccagcactgcctatttgcagatcaacaacctcagaaatgaggacacggctacatatttctgtgcaagagggccctatgctatggactactggggtcaaggaacctcagtcaccgtctcctcagctagcaccaagggccccagcgtgtttcctctcgctccctgcagccggagcacatccgagagcaccgctgctctgggctgtctcgtgaaggactacttccctgaacccgtcaccgtcagctggaatagcggcgccctgacatccggcgtccacacattccccgctgtcctgcagagcagcggcctgtacagcctgagctccgtggtcaccgtgcctagcagcagcctgggaacaaagacctacacctgcaacgtggaccataagccctccaacaccaaggtggacaagcgggtggaatccaagtatggacccccctgtcctccttgccctgctcctgaatttctcggaggcccctccgtcttcctgtttccccccaagcccaaggacaccctgatgatctcccggacacccgaagtcacctgcgtcgtggtggatgtcagccaggaagatcccgaggtgcagttcaactggtacgtggacggagtggaggtgcataacgccaaaaccaagcccagggaagagcagttcaacagcacctatcgggtcgtgtccgtgctcaccgtcctgcatcaggattggctcaacggcaaggagtacaagtgcaaggtgtccaacaagggcctgccctcctccatcgagaagaccatctccaaggctaagggccaacctcgggagccccaagtgtataccctccctcccagccaggaggagatgaccaagaatcaagtgagcctgacctgcctcgtgaagggattttacccctccgacatcgctgtggaatgggaaagcaatggccaacctgagaacaactacaagaccacaccccccgtgctggactccgatggctccttcttcctgtacagcaggctgaccgtggacaaatcccggtggcaagagggaaacgtgttcagctgctccgtgatgcacgaggctctccacaaccactacacccagaagagcctctccctgagcctcggctagtaa

SEQ ID NO: 1331 - DNA, 1332 bp, synthetic construct; identical to SEQ ID NO: 1330
  misc_feature 1..1332: note = 798-9.20H5.A3-mH2mL1 heavy chain DNA sequence
  source 1..1332: mol_type = other DNA

SEQ ID NO: 1332 - DNA, 1329 bp, synthetic construct
  misc_feature 1..1329: note = 20H5.A3-VH1VL1 heavy chain DNA sequence
  source 1..1329: mol_type = other DNA
caggtgcagctcgtccagtctggctccgagttgaagaaacccggcgcctctgtgaaagtttcctgcaaagccagtggatatgcctttaccacgtacgggatgtcctgggttcgccaggcccccggacaggggttggagtggatgggctgggtgaacacatattctggagtaccaacctatgctcagggattcaccgggcggtttgttttcagcctcgatacaagtgttagcacagcctacctgcagatctcttcccttaaggccgaggatactgcagtgtactactgtgcccgtgggccgtacgcaatggactactggggccagggaacccttgtgactgtgagctctgctagcaccaagggccccagcgtgtttcctctcgctccctgcagccggagcacatccgagagcaccgctgctctgggctgtctcgtgaaggactacttccctgaacccgtcaccgtcagctggaatagcggcgccctgacatccggcgtccacacattccccgctgtcctgcagagcagcggcctgtacagcctgagctccgtggtcaccgtgcctagcagcagcctgggaacaaagacctacacctgcaacgtggaccataagccctccaacaccaaggtggacaagcgggtggaatccaagtatggacccccctgtcctccttgccctgctcctgaatttctcggaggcccctccgtcttcctgtttccccccaagcccaaggacaccctgatgatctcccggacacccgaagtcacctgcgtcgtggtggatgtcagccaggaagatcccgaggtgcagttcaactggtacgtggacggagtggaggtgcataacgccaaaaccaagcccagggaagagcagttcaacagcacctatcgggtcgtgtccgtgctcaccgtcctgcatcaggattggctcaacggcaaggagtacaagtgcaaggtgtccaacaagggcctgccctcctccatcgagaagaccatctccaaggctaagggccaacctcgggagccccaagtgtataccctccctcccagccaggaggagatgaccaagaatcaagtgagcctgacctgcctcgtgaagggattttacccctccgacatcgctgtggaatgggaaagcaatggccaacctgagaacaactacaagaccacaccccccgtgctggactccgatggctccttcttcctgtacagcaggctgaccgtggacaaatcccggtggcaagagggaaacgtgttcagctgctccgtgatgcacgaggctctccacaaccactacacccagaagagcctctccctgagcctcggctag

SEQ ID NO: 1333 - DNA, 1329 bp, synthetic construct; identical to SEQ ID NO: 1332
  misc_feature 1..1329: note = 20H5.A3-VH1VL2 heavy chain DNA sequence
  source 1..1329: mol_type = other DNA

SEQ ID NO: 1334 - DNA, 1329 bp, synthetic construct; identical to SEQ ID NO: 1332
  misc_feature 1..1329: note = 20H5.A3-VH1VL3 heavy chain DNA sequence
  source 1..1329: mol_type = other DNA

SEQ ID NO: 1335 - DNA, 1329 bp, synthetic construct; identical to SEQ ID NO: 1332
  misc_feature 1..1329: note = 20H5.A3-VH1VL4 heavy chain DNA sequence
  source 1..1329: mol_type = other DNA

SEQ ID NO: 1336 - DNA, 1329 bp, synthetic construct; identical to SEQ ID NO: 1332
  misc_feature 1..1329: note = 20H5.A3-VH1VL5 heavy chain DNA sequence
  source 1..1329: mol_type = other DNA

SEQ ID NO: 1337 - DNA, 1329 bp, synthetic construct; identical to SEQ ID NO: 1332
  misc_feature 1..1329: note = 20H5.A3-VH1VL6 heavy chain DNA sequence
  source 1..1329: mol_type = other DNA

SEQ ID NO: 1338 - DNA, 1326 bp, synthetic construct
  misc_feature 1..1326: note = 20H5.A3-VH2VL3 heavy chain DNA sequence
  source 1..1326: mol_type = other DNA
caagtgcagctagtgcagagtggctccgaactgaagaagccaggcgcttcagtgaaggtaagttgcaaggctagcggttacgcttttacaacctacggcatgtcatgggtgagacaagccccaggacaggggctagaatggatgggctgggttaacacatacagtggcgtgcccacttccgcccagggctttaccggccgtttcgttttcagtctggataccagcgtctctaccgcatacctccaaattagttctttgaaggcagaggataccgctgtttactattgcgccaggggcccgtacgctatggactactggggccaggggacactggtcaccgtcagcagtgctagcaccaagggccccagcgtgtttcctctcgctccctgcagccggagcacatccgagagcaccgctgctctgggctgtctcgtgaaggactacttccctgaacccgtcaccgtcagctggaatagcggcgccctgacatccggcgtccacacattccccgctgtcctgcagagcagcggcctgtacagcctgagctccgtggtcaccgtgcctagcagcagcctgggaacaaagacctacacctgcaacgtggaccataagccctccaacaccaaggtggacaagcgggtggaatccaagtatggacccccctgtcctccttgccctgctcctgaatttctcggaggcccctccgtcttcctgtttccccccaagcccaaggacaccctgatgatctcccggacacccgaagtcacctgcgtcgtggtggatgtcagccaggaagatcccgaggtgcagttcaactggtacgtggacggagtggaggtgcataacgccaaaaccaagcccagggaagagcagttcaacagcacctatcgggtcgtgtccgtgctcaccgtcctgcatcaggattggctcaacggcaaggagtacaagtgcaaggtgtccaacaagggcctgccctcctccatcgagaagaccatctccaaggctaagggccaacctcgggagccccaagtgtataccctccctcccagccaggaggagatgaccaagaatcaagtgagcctgacctgcctcgtgaagggattttacccctccgacatcgctgtggaatgggaaagcaatggccaacctgagaacaactacaagaccacaccccccgtgctggactccgatggctccttcttcctgtacagcaggctgaccgtggacaaatcccggtggcaagagggaaacgtgttcagctgctccgtgatgcacgaggctctccacaaccactacacccagaagagcctctccctgagcctcggc

SEQ ID NO: 1339 - DNA, 1326 bp, synthetic construct; identical to SEQ ID NO: 1338
  misc_feature 1..1326: note = 20H5.A3-VH2VL4 heavy chain DNA sequence
  source 1..1326: mol_type = other DNA

SEQ ID NO: 1340 - DNA, 1326 bp, synthetic construct; identical to SEQ ID NO: 1338
  misc_feature 1..1326: note = 20H5.A3-VH2VL5 heavy chain DNA sequence
  source 1..1326: mol_type = other DNA

SEQ ID NO: 1341 - DNA, 1326 bp, synthetic construct; identical to SEQ ID NO: 1338
  misc_feature 1..1326: note = 20H5.A3-VH2VL6 heavy chain DNA sequence
  source 1..1326: mol_type = other DNA

SEQ ID NO: 1342 - DNA, 1332 bp, synthetic construct; identical to SEQ ID NO: 904
  misc_feature 1..1332: note = 20H5.A3-VH3VL5 heavy chain DNA sequence
  source 1..1332: mol_type = other DNA

SEQ ID NO: 1343 - DNA, 1332 bp, synthetic construct; identical to SEQ ID NO: 904
  misc_feature 1..1332: note = 20H5.A3-VH3VL6 heavy chain DNA sequence
  source 1..1332: mol_type = other DNA

SEQ ID NO: 1344 - DNA, 1331 bp, synthetic construct; identical to SEQ ID NO: 906
  misc_feature 1..1331: note = 20H5.A3-VH4VL3 heavy chain DNA sequence
  source 1..1331: mol_type = other DNA

SEQ ID NO: 1345 - DNA, 1331 bp, synthetic construct; identical to SEQ ID NO: 906
  misc_feature 1..1331: note = 20H5.A3-VH4VL4 heavy chain DNA sequence
  source 1..1331: mol_type = other DNA

SEQ ID NO: 1346 - DNA, 1331 bp, synthetic construct; identical to SEQ ID NO: 906
  misc_feature 1..1331: note = 20H5.A3-VH4VL5 heavy chain DNA sequence
  source 1..1331: mol_type = other DNA

SEQ ID NO: 1347 - DNA, 1331 bp, synthetic construct; identical to SEQ ID NO: 906
  misc_feature 1..1331: note = 20H5.A3-VH4VL6 heavy chain DNA sequence
  source 1..1331: mol_type = other DNA

SEQ ID NO: 1348 - DNA, 1332 bp, synthetic construct; identical to SEQ ID NO: 907
  misc_feature 1..1332: note = 20H5.A3-VH5VL5 heavy chain DNA sequence
  source 1..1332: mol_type = other DNA

SEQ ID NO: 1349 - DNA, 1332 bp, synthetic construct; identical to SEQ ID NO: 907
  misc_feature 1..1332: note = 20H5.A3-VH5VL6 heavy chain DNA sequence
  source 1..1332: mol_type = other DNA

SEQ ID NO: 1350 - DNA, 1332 bp, synthetic construct; identical to SEQ ID NO: 909
  misc_feature 1..1332: note = 20H5.A3-VH6VL4 heavy chain DNA sequence
  source 1..1332: mol_type = other DNA

SEQ ID NO: 1351 - DNA, 1332 bp, synthetic construct; identical to SEQ ID NO: 909
  misc_feature 1..1332: note = 20H5.A3-VH6VL5 heavy chain DNA sequence
  source 1..1332: mol_type = other DNA

SEQ ID NO: 1352 - DNA, 1332 bp, synthetic construct; identical to SEQ ID NO: 909
  misc_feature 1..1332: note = 20H5.A3-VH6VL6 heavy chain DNA sequence
  source 1..1332: mol_type = other DNA

SEQ ID NO: 1353 - DNA, 1332 bp, synthetic construct
  misc_feature 1..1332: note = 20H5.A3-VH7VL1 heavy chain DNA sequence
  source 1..1332: mol_type = other DNA
cagattcagcttgtacagagtgggttcgaactgaagaagcccggggcctctgttaagatcagttgtaaagccagtggctacgccttcactacctacggaatgtcttgggtacggcaagcccccggacaagggctggaatggatgggctgggtaaacacatatagtggagtgcccacatatgccgatgcctttacaggccggttcgtattctctctggacacttccgtttctactgcctacctgcaaatctcttctctgaaggcagaagacacagctgtttacttttgtgctaggggtccctatgctatggattattgggggcagggcacactagtcacagtctcctcagctagcaccaagggccccagcgtgtttcctctcgctccctgcagccggagcacatccgagagcaccgctgctctgggctgtctcgtgaaggactacttccctgaacccgtcaccgtcagctggaatagcggcgccctgacatccggcgtccacacattccccgctgtcctgcagagcagcggcctgtacagcctgagctccgtggtcaccgtgcctagcagcagcctgggaacaaagacctacacctgcaacgtggaccataagccctccaacaccaaggtggacaagcgggtggaatccaagtatggacccccctgtcctccttgccctgctcctgaatttctcggaggcccctccgtcttcctgtttccccccaagcccaaggacaccctgatgatctcccggacacccgaagtcacctgcgtcgtggtggatgtcagccaggaagatcccgaggtgcagttcaactggtacgtggacggagtggaggtgcataacgccaaaaccaagcccagggaagagcagttcaacagcacctatcgggtcgtgtccgtgctcaccgtcctgcatcaggattggctcaacggcaaggagtacaagtgcaaggtgtccaacaagggcctgccctcctccatcgagaagaccatctccaaggctaagggccaacctcgggagccccaagtgtataccctccctcccagccaggaggagatgaccaagaatcaagtgagcctgacctgcctcgtgaagggattttacccctccgacatcgctgtggaatgggaaagcaatggccaacctgagaacaactacaagaccacaccccccgtgctggactccgatggctccttcttcctgtacagcaggctgaccgtggacaaatcccggtggcaagagggaaacgtgttcagctgctccgtgatgcacgaggctctccacaaccactacacccagaagagcctctccctgagcctcggctagtaa

SEQ ID NO: 1354 - DNA, 1332 bp, synthetic construct; identical to SEQ ID NO: 1353
  misc_feature 1..1332: note = 20H5.A3-VH7VL2 heavy chain DNA sequence
  source 1..1332: mol_type = other DNA

SEQ ID NO: 1355 - DNA, 1332 bp, synthetic construct; identical to SEQ ID NO: 1353
  misc_feature 1..1332: note = 20H5.A3-VH7VL3 heavy chain DNA sequence
  source 1..1332: mol_type = other DNA

SEQ ID NO: 1356 - DNA, 1332 bp, synthetic construct; identical to SEQ ID NO: 1353
  misc_feature 1..1332: note = 20H5.A3-VH7VL4 heavy chain DNA sequence
  source 1..1332: mol_type = other DNA

SEQ ID NO: 1357 - DNA, 1332 bp, synthetic construct; identical to SEQ ID NO: 1353
  misc_feature 1..1332: note = 20H5.A3-VH7VL5 heavy chain DNA sequence
  source 1..1332: mol_type = other DNA

SEQ ID NO: 1358 - DNA, 1332 bp, synthetic construct; identical to SEQ ID NO: 1353
  misc_feature 1..1332: note = 20H5.A3-VH7VL6 heavy chain DNA sequence
  source 1..1332: mol_type = other DNA

SEQ ID NO: 1359 - DNA, 1341 bp, synthetic construct
  misc_feature 1..1341: note = 20H5.A3_hVH3VL1-hIgG1 (KEMv2) heavy chain DNA sequence
  source 1..1341: mol_type = other DNA
caaatccagcttgttcagagtggatcagaactcaagaagcccggagcatccgtgaaagtgtcatgcaaggccagtggctacgcttttactacatatgggatgtcttgggttcggcaggcccccggccagggactagagtggatgggctgggttaacacctatagcggagtgcctacgtacgccgatgattttacaggcaggttcgtattttctctcgaaacgtccgtcagtaccgcctacctccaaattagctctctgaaagcagaggacaccgcagtctacttttgcgccagaggtccgtatgctatggattattggggacagggcaccctggtgacagtatcctccgctagcaccaaggggccctccgtgttccccctcgcaccatcctcaaaaagtaccagtgggggtactgctgctttgggctgcttggtgaaggactattttcctgagcctgtgacagttagttggaactccggggctctgacctcaggagtccatacatttccagcagtcttgcaaagtagcgggttgtattcattgtcctctgtcgtgaccgttccctcatctagcttggggactcaaacatatatttgcaatgtaaatcacaagccttcaaacaccaaagtagataagaaggtcgagcccaaatcatgtgacaaaacacatacatgccccccatgtccagccccagagctcctgggcgggccatctgtattcctgttccccccaaagcccaaagacactttgatgataagtcgtacccctgaggtaacttgcgtggttgtcgatgtgagtcatgaagaccctgaggttaagtttaactggtacgtagacggcgttgaagtacacaatgcaaaaacaaagccaagggaagagcagtacaactctacatatagagtggtttcagtcctcactgtactgcatcaagactggctcaatggtaaggaatacaagtgcaaggtctcaaacaaggccctccctgctccaatcgaaaagaccatatctaaagctaaagggcagcctcgggagcctcaggtttacactcttccaccctccagggaggaaatgacaaagaaccaggtcagtcttacttgtctggtcaaggggttctaccccagcgacatagccgtagaatgggaatcaaatgggcagccagagaataactataagacaacccctcccgtacttgactctgatggttctttctttctctactcaaaactgaccgttgataagtcccgctggcagcaggggaatgttttctcctgctccgtgatgcatgaggctctgcataatcactacacacagaaatctttgtcactcagtccaggctagtaa

SEQ ID NO: 1360 - DNA, 1341 bp, synthetic construct
  misc_feature 1..1341: note = 20H5.A3_hVH3VL1-hIgG1 (LALAPGv2) heavy chain DNA sequence
  source 1..1341: mol_type = other DNA
caaatccagcttgttcagagtggatcagaactcaagaagcccggagcatccgtgaaagtgtcatgcaaggccagtggctacgcttttactacatatgggatgtcttgggttcggcaggcccccggccagggactagagtggatgggctgggttaacacctatagcggagtgcctacgtacgccgatgattttacaggcaggttcgtattttctctcgaaacgtccgtcagtaccgcctacctccaaattagctctctgaaagcagaggacaccgcagtctacttttgcgccagaggtccgtatgctatggattattggggacagggcaccctggtgacagtatcctccgctagcaccaaggggccctccgtgtttcccttggcaccatcctcaaaaagtaccagtgggggtactgctgctttgggctgcttggtgaaggactattttcctgagcctgtgacagttagttggaactccggggctctgacctcaggagtccatacatttccagcagtcttgcaaagtagcgggttgtattcattgtcctctgtcgtgaccgttccctcatctagcttggggactcaaacatatatttgcaatgtaaatcacaagccttcaaacaccaaagtagataagaaggtcgagcccaaatcatgtgacaaaacacatacatgccccccatgtccagccccagaggccgccggcgggccatctgtattcctgttccccccaaagcccaaagacactttgatgataagtcgtacccctgaggtaacttgcgtggttgtcgatgtgagtcatgaagaccctgaggttaagtttaactggtacgtagacggcgttgaagtacacaatgcaaaaacaaagccaagggaagagcagtacaactctacatatagagtggtttcagtcctcactgtactgcatcaagactggctcaatggtaaggaatacaagtgcaaggtctcaaacaaggccctcggcgctccaatcgaaaagaccatatctaaagctaaagggcagcctcgggagcctcaggtttacactcttccaccctccagggaggaaatgacaaagaaccaggtcagtcttacttgtctggtcaaggggttctaccccagcgacatagccgtagaatgggaatcaaatgggcagccagagaataactataagacaacccctcccgtacttgactctgatggttctttctttctctactcaaaactgaccgttgataagtcccgctggcagcaggggaatgttttctcctgctccgtgatgcatgaggctctgcataatcactacacacagaaatctttgtcactcagtccaggctagtaa

SEQ ID NO: 1361 - DNA, 1341 bp, synthetic construct
  misc_feature 1..1341: note = 20H5.A3_hVH3VL1-hIgG1 (REM) heavy chain DNA sequence
  source 1..1341: mol_type = other DNA
caaatccagcttgttcagagtggatcagaactcaagaagcccggagcatccgtgaaagtgtcatgcaaggccagtggctacgcttttactacatatgggatgtcttgggttcggcaggcccccggccagggactagagtggatgggctgggttaacacctatagcggagtgcctacgtacgccgatgattttacaggcaggttcgtattttctctcgaaacgtccgtcagtaccgcctacctccaaattagctctctgaaagcagaggacaccgcagtctacttttgcgccagaggtccgtatgctatggattattggggacagggcaccctggtgacagtatcctccgctagcaccaaggggccctccgtgtttcccttggcaccatcctcaaaaagtaccagtgggggtactgctgctttgggctgcttggtgaaggactattttcctgagcctgtgacagttagttggaactccggggctctgacctcaggagtccatacatttccagcagtcttgcaaagtagcgggttgtattcattgtcctctgtcgtgaccgttccctcatctagcttggggactcaaacatatatttgcaatgtaaatcacaagccttcaaacaccaaagtagataagagggtcgagcccaaatcatgtgacaaaacacatacatgccccccatgtccagccccagagctcctgggcgggccatctgtattcctgttccccccaaagcccaaagacactttgatgataagtcgtacccctgaggtaacttgcgtggttgtcgatgtgagtcatgaagaccctgaggttaagtttaactggtacgtagacggcgttgaagtacacaatgcaaaaacaaagccaagggaagagcagtacaactctacatatagagtggtttcagtcctcactgtactgcatcaagactggctcaatggtaaggaatacaagtgcaaggtctcaaacaaggccctccctgctccaatcgaaaagaccatatctaaagctaaagggcagcctcgggagcctcaggtttacactcttccaccctccagggaggaaatgacaaagaaccaggtcagtcttacttgtctggtcaaggggttctaccccagcgacatagccgtagaatgggaatcaaatgggcagccagagaataactataagacaacccctcccgtacttgactctgatggttctttctttctctactcaaaactgaccgttgataagtcccgctggcagcaggggaatgttttctcctgctccgtgatgcatgaggctctgcataatcactacacacagaaatctttgtcactcagtccaggctagtaa

SEQ ID NO: 1362 - DNA, 1341 bp, synthetic construct
  misc_feature 1..1341: note = 20H5.A3_hVH5VL1-hIgG1 (KEMv2) heavy chain DNA sequence
  source 1..1341: mol_type = other DNA
caagtgcaactggtgcagagcggctttgagctgaaaaagcccggcgcctctgtgaagatcagttgcaaagcttccggctacgcctttaccacctatggtatgtcttgggttagacaggctccaggacagggcctggagtggatgggttgggtcaatacctactctggagtgccaacctatgctcaggcattcacaggccggtttgtcttcagtctcgataccagcgtgtcaaccgcatacctgcagatcagctctcttaaagccgaggataccgctgtctactactgtgccagaggaccttatgccatggattactgggggcaaggcaccctcgtcacagtgtcttctgctagcaccaaggggccctccgtgttccccctcgcaccatcctcaaaaagtaccagtgggggtactgctgctttgggctgcttggtgaaggactattttcctgagcctgtgacagttagttggaactccggggctctgacctcaggagtccatacatttccagcagtcttgcaaagtagcgggttgtattcattgtcctctgtcgtgaccgttccctcatctagcttggggactcaaacatatatttgcaatgtaaatcacaagccttcaaacaccaaagtagataagaaggtcgagcccaaatcatgtgacaaaacacatacatgccccccatgtccagccccagagctcctgggcgggccatctgtattcctgttccccccaaagcccaaagacactttgatgataagtcgtacccctgaggtaacttgcgtggttgtcgatgtgagtcatgaagaccctgaggttaagtttaactggtacgtagacggcgttgaagtacacaatgcaaaaacaaagccaagggaagagcagtacaactctacatatagagtggtttcagtcctcactgtactgcatcaagactggctcaatggtaaggaatacaagtgcaaggtctcaaacaaggccctccctgctccaatcgaaaagaccatatctaaagctaaagggcagcctcgggagcctcaggtttacactcttccaccctccagggaggaaatgacaaagaaccaggtcagtcttacttgtctggtcaaggggttctaccccagcgacatagccgtagaatgggaatcaaatgggcagccagagaataactataagacaacccctcccgtacttgactctgatggttctttctttctctactcaaaactgaccgttgataagtcccgctggcagcaggggaatgttttctcctgctccgtgatgcatgaggctctgcataatcactacacacagaaatctttgtcactcagtccaggctagtaa

SEQ ID NO: 1363 - DNA, 1341 bp, synthetic construct
  misc_feature 1..1341: note = 20H5.A3_hVH5VL1-hIgG1 (LALAPGv2) heavy chain DNA sequence
  source 1..1341: mol_type = other DNA
caagtgcaactggtgcagagcggctttgagctgaaaaagcccggcgcctctgtgaagatcagttgcaaagcttccggctacgcctttaccacctatggtatgtcttgggttagacaggctccaggacagggcctggagtggatgggttgggtcaatacctactctggagtgccaacctatgctcaggcattcacaggccggtttgtcttcagtctcgataccagcgtgtcaaccgcatacctgcagatcagctctcttaaagccgaggataccgctgtctactactgtgccagaggaccttatgccatggattactgggggcaaggcaccctcgtcacagtgtcttctgctagcaccaaggggccctccgtgtttcccttggcaccatcctcaaaaagtaccagtgggggtactgctgctttgggctgcttggtgaaggactattttcctgagcctgtgacagttagttggaactccggggctctgacctcaggagtccatacatttccagcagtcttgcaaagtagcgggttgtattcattgtcctctgtcgtgaccgttccctcatctagcttggggactcaaacatatatttgcaatgtaaatcacaagccttcaaacaccaaagtagataagaaggtcgagcccaaatcatgtgacaaaacacatacatgccccccatgtccagccccagaggccgccggcgggccatctgtattcctgttccccccaaagcccaaagacactttgatgataagtcgtacccctgaggtaacttgcgtggttgtcgatgtgagtcatgaagaccctgaggttaagtttaactggtacgtagacggcgttgaagtacacaatgcaaaaacaaagccaagggaagagcagtacaactctacatatagagtggtttcagtcctcactgtactgcatcaagactggctcaatggtaaggaatacaagtgcaaggtctcaaacaaggccctcggcgctccaatcgaaaagaccatatctaaagctaaagggcagcctcgggagcctcaggtttacactcttccaccctccagggaggaaatgacaaagaaccaggtcagtcttacttgtctggtcaaggggttctaccccagcgacatagccgtagaatgggaatcaaatgggcagccagagaataactataagacaacccctcccgtacttgactctgatggttctttctttctctactcaaaactgaccgttgataagtcccgctggcagcaggggaatgttttctcctgctccgtgatgcatgaggctctgcataatcactacacacagaaatctttgtcactcagtccaggctagtaa

SEQ ID NO: 1364 - DNA, 1341 bp, synthetic construct
  misc_feature 1..1341: note = 20H5.A3_hVH5VL1-hIgG1 (REM) heavy chain DNA sequence
  source 1..1341: mol_type = other DNA
caagtgcaactggtgcagagcggctttgagctgaaaaagcccggcgcctctgtgaagatcagttgcaaagcttccggctacgcctttaccacctatggtatgtcttgggttagacaggctccaggacagggcctggagtggatgggttgggtcaatacctactctggagtgccaacctatgctcaggcattcacaggccggtttgtcttcagtctcgataccagcgtgtcaaccgcatacctgcagatcagctctcttaaagccgaggataccgctgtctactactgtgccagaggaccttatgccatggattactgggggcaaggcaccctcgtcacagtgtcttctgctagcaccaaggggccctccgtgtttcccttggcaccatcctcaaaaagtaccagtgggggtactgctgctttgggctgcttggtgaaggactattttcctgagcctgtgacagttagttggaactccggggctctgacctcaggagtccatacatttccagcagtcttgcaaagtagcgggttgtattcattgtcctctgtcgtgaccgttccctcatctagcttggggactcaaacatatatttgcaatgtaaatcacaagccttcaaacaccaaagtagataagagggtcgagcccaaatcatgtgacaaaacacatacatgccccccatgtccagccccagagctcctgggcgggccatctgtattcctgttccccccaaagcccaaagacactttgatgataagtcgtacccctgaggtaacttgcgtggttgtcgatgtgagtcatgaagaccctgaggttaagtttaactggtacgtagacggcgttgaagtacacaatgcaaaaacaaagccaagggaagagcagtacaactctacatatagagtggtttcagtcctcactgtactgcatcaagactggctcaatggtaaggaatacaagtgcaaggtctcaaacaaggccctccctgctccaatcgaaaagaccatatctaaagctaaagggcagcctcgggagcctcaggtttacactcttccaccctccagggaggaaatgacaaagaaccaggtcagtcttacttgtctggtcaaggggttctaccccagcgacatagccgtagaatgggaatcaaatgggcagccagagaataactataagacaacccctcccgtacttgactctgatggttctttctttctctactcaaaactgaccgttgataagtcccgctggcagcaggggaatgttttctcctgctccgtgatgcatgaggctctgcataatcactacacacagaaatctttgtcactcagtccaggctagtaa

SEQ ID NO: 1365 - DNA, 1341 bp, synthetic construct
  misc_feature 1..1341: note = 20H5.A3_hVH6VL1-hIgG1 (KEMv2) heavy chain DNA sequence
  source 1..1341: mol_type = other DNA
caggttcagcttgtccaatcaggctttgagctgaagaagcctggagctagcgtcaagattagttgtaaggcctcaggctacgctttcaccacctacggaatgtcctgggtgcggcaagccccaggccagggcctggagtggatgggatgggtgaatacgtacagtggcgtccccactagcgcccaggcttttactggaagattcgtgttctctcttgatacctccgtatcaaccgcttacctgcagataagttcactcaaggctgaggataccgccgtgtattattgtgcccgagggccctacgctatggattactggggacagggcacactcgtaacagtgagctctgctagcaccaaggggccctccgtgttccccctcgcaccatcctcaaaaagtaccagtgggggtactgctgctttgggctgcttggtgaaggactattttcctgagcctgtgacagttagttggaactccggggctctgacctcaggagtccatacatttccagcagtcttgcaaagtagcgggttgtattcattgtcctctgtcgtgaccgttccctcatctagcttggggactcaaacatatatttgcaatgtaaatcacaagccttcaaacaccaaagtagataagaaggtcgagcccaaatcatgtgacaaaacacatacatgccccccatgtccagccccagagctcctgggcgggccatctgtattcctgttccccccaaagcccaaagacactttgatgataagtcgtacccctgaggtaacttgcgtggttgtcgatgtgagtcatgaagaccctgaggttaagtttaactggtacgtagacggcgttgaagtacacaatgcaaaaacaaagccaagggaagagcagtacaactctacatatagagtggtttcagtcctcactgtactgcatcaagactggctcaatggtaaggaatacaagtgcaaggtctcaaacaaggccctccctgctccaatcgaaaagaccatatctaaagctaaagggcagcctcgggagcctcaggtttacactcttccaccctccagggaggaaatgacaaagaaccaggtcagtcttacttgtctggtcaaggggttctaccccagcgacatagccgtagaatgggaatcaaatgggcagccagagaataactataagacaacccctcccgtacttgactctgatggttctttctttctctactcaaaactgaccgttgataagtcccgctggcagcaggggaatgttttctcctgctccgtgatgcatgaggctctgcataatcactacacacagaaatctttgtcactcagtccaggctagtaa

SEQ ID NO: 1366 - DNA, 1341 bp, synthetic construct
  misc_feature 1..1341: note = 20H5.A3_hVH6VL1-hIgG1 (LALAPGv2) heavy chain DNA sequence
  source 1..1341: mol_type = other DNA
caggttcagcttgtccaatcaggctttgagctgaagaagcctggagctagcgtcaagattagttgtaaggcctcaggctacgctttcaccacctacggaatgtcctgggtgcggcaagccccaggccagggcctggagtggatgggatgggtgaatacgtacagtggcgtccccactagcgcccaggcttttactggaagattcgtgttctctcttgatacctccgtatcaaccgcttacctgcagataagttcactcaaggctgaggataccgccgtgtattattgtgcccgagggccctacgctatggattactggggacagggcacactcgtaacagtgagctctgctagcaccaaggggccctccgtgtttcccttggcaccatcctcaaaaagtaccagtgggggtactgctgctttgggctgcttggtgaaggactattttcctgagcctgtgacagttagttggaactccggggctctgacctcaggagtccatacatttccagcagtcttgcaaagtagcgggttgtattcattgtcctctgtcgtgaccgttccctcatctagcttggggactcaaacatatatttgcaatgtaaatcacaagccttcaaacaccaaagtagataagaaggtcgagcccaaatcatgtgacaaaacacatacatgccccccatgtccagccccagaggccgccggcgggccatctgtattcctgttccccccaaagcccaaagacactttgatgataagtcgtacccctgaggtaacttgcgtggttgtcgatgtgagtcatgaagaccctgaggttaagtttaactggtacgtagacggcgttgaagtacacaatgcaaaaacaaagccaagggaagagcagtacaactctacatatagagtggtttcagtcctcactgtactgcatcaagactggctcaatggtaaggaatacaagtgcaaggtctcaaacaaggccctcggcgctccaatcgaaaagaccatatctaaagctaaagggcagcctcgggagcctcaggtttacactcttccaccctccagggaggaaatgacaaagaaccaggtcagtcttacttgtctggtcaaggggttctaccccagcgacatagccgtagaatgggaatcaaatgggcagccagagaataactataagacaacccctcccgtacttgactctgatggttctttctttctctactcaaaactgaccgttgataagtcccgctggcagcaggggaatgttttctcctgctccgtgatgcatgaggctctgcataatcactacacacagaaatctttgtcactcagtccaggctagtaa

SEQ ID NO: 1367 - DNA, 1341 bp, synthetic construct
  misc_feature 1..1341: note = 20H5.A3_hVH6VL1-hIgG1 (REM) heavy chain DNA sequence
  source 1..1341: mol_type = other DNA
caggttcagcttgtccaatcaggctttgagctgaagaagcctggagctagcgtcaagattagttgtaaggcctcaggctacgctttcaccacctacggaatgtcctgggtgcggcaagccccaggccagggcctggagtggatgggatgggtgaatacgtacagtggcgtccccactagcgcccaggcttttactggaagattcgtgttctctcttgatacctccgtatcaaccgcttacctgcagataagttcactcaaggctgaggataccgccgtgtattattgtgcccgagggccctacgctatggattactggggacagggcacactcgtaacagtgagctctgctagcaccaaggggccctccgtgtttcccttggcaccatcctcaaaaagtaccagtgggggtactgctgctttgggctgcttggtgaaggactattttcctgagcctgtgacagttagttggaactccggggctctgacctcaggagtccatacatttccagcagtcttgcaaagtagcgggttgtattcattgtcctctgtcgtgaccgttccctcatctagcttggggactcaaacatatatttgcaatgtaaatcacaagccttcaaacaccaaagtagataagagggtcgagcccaaatcatgtgacaaaacacatacatgccccccatgtccagccccagagctcctgggcgggccatctgtattcctgttccccccaaagcccaaagacactttgatgataagtcgtacccctgaggtaacttgcgtggttgtcgatgtgagtcatgaagaccctgaggttaagtttaactggtacgtagacggcgttgaagtacacaatgcaaaaacaaagccaagggaagagcagtacaactctacatatagagtggtttcagtcctcactgtactgcatcaagactggctcaatggtaaggaatacaagtgcaaggtctcaaacaaggccctccctgctccaatcgaaaagaccatatctaaagctaaagggcagcctcgggagcctcaggtttacactcttccaccctccagggaggaaatgacaaagaaccaggtcagtcttacttgtctggtcaaggggttctaccccagcgacatagccgtagaatgggaatcaaatgggcagccagagaataactataagacaacccctcccgtacttgactctgatggttctttctttctctactcaaaactgaccgttgataagtcccgctggcagcaggggaatgttttctcctgctccgtgatgcatgaggctctgcataatcactacacacagaaatctttgtcactcagtccaggctagtaa

SEQ ID NO: 1368 - DNA, 645 bp, synthetic construct
  misc_feature 1..645: note = 20H5.A3-hIgG4 (S228P) light chain DNA sequence
  source 1..645: mol_type = other DNA
gatatccagatgacacagactacatcctccctgtctgcctctctgggagacagagtcaccatcaattgcagtgcaagtcaggacattagcaattatttaaactggtatcagcagaaaccagatggaactgttaaactcctgatctattacacatcaagtttactctcaggagtcccatcaaggttcagtggcagtgggtctgggacagattattctctcaccatcagcaacctggaacctgaagatattgccacttacttttgtcagcaatatagtaagcttccctatacgttcggatcggggacccacctggaaataaaacggaccgtggccgcccccagcgtgttcatcttccctcccagcgacgagcagctgaagtctggcaccgccagcgtggtgtgcctgctgaacaacttctacccccgcgaggccaaggtgcagtggaaggtggacaacgccctgcagagcggcaacagccaggagagcgtgaccgagcaggactccaaggacagcacctacagcctgagcagcaccctgaccctgagcaaggccgactacgagaagcacaaggtgtacgcctgcgaggtgacccaccagggactgtctagccccgtgaccaagagcttcaaccggggcgagtgctaa

SEQ ID NO: 1369 - DNA, 645 bp, synthetic construct
  misc_feature 1..645: note = 20H5.A3-hIgG4 (S28P)-mv2 light chain DNA sequence
  source 1..645: mol_type = other DNA
gatatccagatgacacagactacatcctccctgtctgcctctctgggagacagagtcaccatcaattgcagtgcaagtcaggacattagcaattatttaaactggtatcagcagaaaccagatggaactgttaaactcctgatctattacacatcaagtttactctcaggagtcccatcaaggttcagtggcagtgggtctgggacagattattctctcaccatcagcaacctggaacctgaagatattgccacttacttttgtcagcaatatagtaagcttccctatacgttcggatcggggaccaaactggaaataaaacggaccgtggccgcccccagcgtgttcatcttccctcccagcgacgagcagctgaagtctggcaccgccagcgtggtgtgcctgctgaacaacttctacccccgcgaggccaaggtgcagtggaaggtggacaacgccctgcagagcggcaacagccaggagagcgtgaccgagcaggactccaaggacagcacctacagcctgagcagcaccctgaccctgagcaaggccgactacgagaagcacaaggtgtacgcctgcgaggtgacccaccagggactgtctagccccgtgaccaagagcttcaaccggggcgagtgctaa

SEQ ID NO: 1370 - DNA, 645 bp, synthetic construct
  misc_feature 1..645: note = 798-9.20H5.A3-mH0mL1 light chain DNA sequence
  source 1..645: mol_type = other DNA
gatatccagatgacacagactacatcctccctgtctgcctctctgggagacagagtcaccatcagttgcagtgcaagtcaggacattagcaattatttaaactggtatcagcagaaaccagatggaactgttaaactcctgatctattacacatcaagtttactctcaggagtcccatcaaggttcagtggcagtgggtctgggacagattattctctcaccatcagcaacctggaacctgaagatattgccacttacttttgtcagcaatatagtaagcttccctatacgttcggatcggggacccacctggaaataaaacggaccgtggccgcccccagcgtgttcatcttccctcccagcgacgagcagctgaagtctggcaccgccagcgtggtgtgcctgctgaacaacttctacccccgcgaggccaaggtgcagtggaaggtggacaacgccctgcagagcggcaacagccaggagagcgtgaccgagcaggactccaaggacagcacctacagcctgagcagcaccctgaccctgagcaaggccgactacgagaagcacaaggtgtacgcctgcgaggtgacccaccagggactgtctagccccgtgaccaagagcttcaaccggggcgagtgctaa

SEQ ID NO: 1371 - DNA, 648 bp, synthetic construct
  misc_feature 1..648: note = 798-9.20H5.A3-mH1mL0 light chain DNA sequence
  source 1..648: mol_type = other DNA
gatatccagatgacccagaccacaagctctctgtccgctagccttggagacagagtgaccatcaactgcagtgcaagccaggatatctccaactacctgaattggtaccagcagaagcctgacggtacggtgaaacttctaatatactacacttcatctctgctgtctggggtgcccagtaggttcagcggtagcggttcagggactgattattcacttacgatatcaaacctggaacccgaggacattgccacttacttctgccagcagtacagtaagttgccttatacattcggtagtggaactcaccttgagattaaacgtgctgatgttgcccctactgtgtccatcttccccccctcctccgagcagctgacatccggcggcgcctccgtggtgtgcttcctgaacaacttctaccccaaagacatcaacgtgaaatggaaaatcgacggctccgagaggcagaacggcgtgctgaactcctggacagaccaggactccaaagactccacatactccatgtcctccacactgacactgacaaaagacgagtacgagaggcacaactcctacacatgcgaggccacacacaaaacatccacatcccccatcgtgaaatccttcaacaggaacgagtgctaataa

SEQ ID NO: 1372 - DNA, 645 bp, synthetic construct; identical to SEQ ID NO: 1370
  misc_feature 1..645: note = 798-9.20H5.A3-mH1mL1 light chain DNA sequence
  source 1..645: mol_type = other DNA

SEQ ID NO: 1373 - DNA, 648 bp, synthetic construct; identical to SEQ ID NO: 1371
  misc_feature 1..648: note = 798-9.20H5.A3-mH2mL0 light chain DNA sequence
  source 1..648: mol_type = other DNA

SEQ ID NO: 1374 - DNA, 645 bp, synthetic construct; identical to SEQ ID NO: 1370
  misc_feature 1..645: note = 798-9.20H5.A3-mH2mL1 light chain DNA sequence
  source 1..645: mol_type = other DNA

SEQ ID NO: 1375 - DNA, 645 bp, synthetic construct; identical to SEQ ID NO: 919
  misc_feature 1..645: note = 20H5.A3-VH1VL1 light chain DNA sequence
  source 1..645: mol_type = other DNA

SEQ ID NO: 1376 - DNA, 645 bp, synthetic construct
  misc_feature 1..645: note = 20H5.A3-VH1VL2 light chain DNA sequence
  source 1..645: mol_type = other DNA
gacatccaaatgacacagagtcccagttcccttagtgcctccgtgggggaccgtgttactatcacatgctcagctagccaagacatatccaattacctaaattggtatcagcagaagcctggcaaagcacctaagctcctgatttattacacctcatccctgttgacgggggttcccagccggtttagcggtagtgggtcaggaacagactacaccttcactataagcagcctgcaacccgaggatattgctacttatttttgtcagcagtattccaagctgccttacacattcggtcagggcacaaagctggaaattaagaggaccgtggccgcccccagcgtgttcatcttccctcccagcgacgagcagctgaagtctggcaccgccagcgtggtgtgcctgctgaacaacttctacccccgcgaggccaaggtgcagtggaaggtggacaacgccctgcagagcggcaacagccaggagagcgtgaccgagcaggactccaaggacagcacctacagcctgagcagcaccctgaccctgagcaaggccgactacgagaagcacaaggtgtacgcctgcgaggtgacccaccagggactgtctagccccgtgaccaagagcttcaaccggggcgagtgctaa

SEQ ID NO: 1377 - DNA, 645 bp, synthetic construct; identical to SEQ ID NO: 920
  misc_feature 1..645: note = 20H5.A3-VH1VL3 light chain DNA sequence
  source 1..645: mol_type = other DNA

SEQ ID NO: 1378 - DNA, 645 bp, synthetic construct
  misc_feature 1..645: note = 20H5.A3-VH1VL4 light chain DNA sequence
  source 1..645: mol_type = other DNA
gacattcaaatgacacagagcccctctagtttgtcagccagtgtcggagaccgggtgactattacatgctcagccagtcaagacatcagcaactatctaaattggtatcagcagaaacccgggaaggctcctaagctgctgatttattacacatctagcttgctgagcggggtcccgagtagattcagtggatccggttctgggacagactataccctcaccatctcatccctgcaaccagaggacttcgctacttacttctgccagcagtatagcaaacttccctacacatttggacaggggacaaaactggagattaaaaggaccgtggccgcccccagcgtgttcatcttccctcccagcgacgagcagctgaagtctggcaccgccagcgtggtgtgcctgctgaacaacttctacccccgcgaggccaaggtgcagtggaaggtggacaacgccctgcagagcggcaacagccaggagagcgtgaccgagcaggactccaaggacagcacctacagcctgagcagcaccctgaccctgagcaaggccgactacgagaagcacaaggtgtacgcctgcgaggtgacccaccagggactgtctagccccgtgaccaagagcttcaaccggggcgagtgctaa

SEQ ID NO: 1379 - DNA, 645 bp, synthetic construct
  misc_feature 1..645: note = 20H5.A3-VH1VL5 light chain DNA sequence
  source 1..645: mol_type = other DNA
gacatccaaatgacacagagtcccagttcccttagtgcctccgtgggggaccgtgttactatcaactgctcagctagccaagacatatccaattacctaaattggtatcagcagaagcctggcaaagcacctaagctcctgatttattacacctcatccctgttgacgggggttcccagccggtttagcggtagtgggtcaggaacagactacaccttcactataagcagcctgcaacccgaggatattgctacttatttttgtcagcagtattccaagctgccttacacattcggtcagggcacaaagctggaaattaagaggaccgtggccgcccccagcgtgttcatcttccctcccagcgacgagcagctgaagtctggcaccgccagcgtggtgtgcctgctgaacaacttctacccccgcgaggccaaggtgcagtggaaggtggacaacgccctgcagagcggcaacagccaggagagcgtgaccgagcaggactccaaggacagcacctacagcctgagcagcaccctgaccctgagcaaggccgactacgagaagcacaaggtgtacgcctgcgaggtgacccaccagggactgtctagccccgtgaccaagagcttcaaccggggcgagtgctaa

SEQ ID NO: 1380 - DNA, 645 bp, synthetic construct
  misc_feature 1..645: note = 20H5.A3-VH1VL6 light chain DNA sequence
  source 1..645: mol_type = other DNA
gacattcaaatgacacagagcccctctagtttgtcagccagtgtcggagaccgggtgactattaactgctcagccagtcaagacatcagcaactatctaaattggtatcagcagaaacccgggaaggctcctaagctgctgatttattacacatctagcttgctgagcggggtcccgagtagattcagtggatccggttctgggacagactataccctcaccatctcatccctgcaaccagaggacttcgctacttacttctgccagcagtatagcaaacttccctacacatttggacaggggacaaaactggagattaaaaggaccgtggccgcccccagcgtgttcatcttccctcccagcgacgagcagctgaagtctggcaccgccagcgtggtgtgcctgctgaacaacttctacccccgcgaggccaaggtgcagtggaaggtggacaacgccctgcagagcggcaacagccaggagagcgtgaccgagcaggactccaaggacagcacctacagcctgagcagcaccctgaccctgagcaaggccgactacgagaagcacaaggtgtacgcctgcgaggtgacccaccagggactgtctagccccgtgaccaagagcttcaaccggggcgagtgctaa

SEQ ID NO: 1381 - DNA, 645 bp, synthetic construct; identical to SEQ ID NO: 920
  misc_feature 1..645: note = 20H5.A3-VH2VL3 light chain DNA sequence
  source 1..645: mol_type = other DNA

SEQ ID NO: 1382 - DNA, 645 bp, synthetic construct; identical to SEQ ID NO: 1378
  misc_feature 1..645: note = 20H5.A3-VH2VL4 light chain DNA sequence
  source 1..645: mol_type = other DNA

SEQ ID NO: 1383 - DNA, 645 bp, synthetic construct; identical to SEQ ID NO: 1379
  misc_feature 1..645: note = 20H5.A3-VH2VL5 light chain DNA sequence
  source 1..645: mol_type = other DNA

SEQ ID NO: 1384 - DNA, 645 bp, synthetic construct; identical to SEQ ID NO: 1380
  misc_feature 1..645: note = 20H5.A3-VH2VL6 light chain DNA sequence
  source 1..645: mol_type = other DNA

SEQ ID NO: 1385 - DNA, 645 bp, synthetic construct; identical to SEQ ID NO: 1379
  misc_feature 1..645: note = 20H5.A3-VH3VL5 light chain DNA sequence
  source 1..645: mol_type = other DNA

SEQ ID NO: 1386 - DNA, 645 bp, synthetic construct; identical to SEQ ID NO: 1380
  misc_feature 1..645: note = 20H5.A3-VH3VL6 light chain DNA sequence
  source 1..645: mol_type = other DNA

SEQ ID NO: 1387 - DNA, 645 bp, synthetic construct; identical to SEQ ID NO: 920
  misc_feature 1..645: note = 20H5.A3-VH4VL3 light chain DNA sequence
  source 1..645: mol_type = other DNA

SEQ ID NO: 1388 - DNA, 645 bp, synthetic construct; identical to SEQ ID NO: 1378
  misc_feature 1..645: note = 20H5.A3-VH4VL4 light chain DNA sequence
  source 1..645: mol_type = other DNA

SEQ ID NO: 1389 - DNA, 645 bp, synthetic construct; identical to SEQ ID NO: 1379
  misc_feature 1..645: note = 20H5.A3-VH4VL5 light chain DNA sequence
  source 1..645: mol_type = other DNA

SEQ ID NO: 1390 - DNA, 645 bp, synthetic construct; identical to SEQ ID NO: 1380
  misc_feature 1..645: note = 20H5.A3-VH4VL6 light chain DNA sequence
  source 1..645: mol_type = other DNA

SEQ ID NO: 1391 - DNA, 645 bp, synthetic construct; identical to SEQ ID NO: 1379
  misc_feature 1..645: note = 20H5.A3-VH5VL5 light chain DNA sequence
  source 1..645: mol_type = other DNA

SEQ ID NO: 1392 - DNA, 645 bp, synthetic construct; identical to SEQ ID NO: 1380
  misc_feature 1..645: note = 20H5.A3-VH5VL6 light chain DNA sequence
  source 1..645: mol_type = other DNA

SEQ ID NO: 1393 - DNA, 645 bp, synthetic construct; identical to SEQ ID NO: 1378
  misc_feature 1..645: note = 20H5.A3-VH6VL4 light chain DNA sequence
  source 1..645: mol_type = other DNA

SEQ ID NO: 1394 - DNA, 645 bp, synthetic construct; identical to SEQ ID NO: 1379
  misc_feature 1..645: note = 20H5.A3-VH6VL5 light chain DNA sequence
  source 1..645: mol_type = other DNA

SEQ ID NO: 1395 - DNA, 645 bp, synthetic construct; identical to SEQ ID NO: 1378
  misc_feature 1..645: note = 20H5.A3-VH6VL6 light chain DNA sequence
  source 1..645: mol_type = other DNA

SEQ ID NO: 1396 - DNA, 645 bp, synthetic construct; identical to SEQ ID NO: 919
  misc_feature 1..645: note = 20H5.A3-VH7VL1 light chain DNA sequence
  source 1..645: mol_type = other DNA

SEQ ID NO: 1397 - DNA, 645 bp, synthetic construct; identical to SEQ ID NO: 1376
  misc_feature 1..645: note = 20H5.A3-VH7VL2 light chain DNA sequence
  source 1..645: mol_type = other DNA

SEQ ID NO: 1398 - DNA, 645 bp, synthetic construct; identical to SEQ ID NO: 920
  misc_feature 1..645: note = 20H5.A3-VH7VL3 light chain DNA sequence
  source 1..645: mol_type = other DNA

SEQ ID NO: 1399 - DNA, 645 bp, synthetic construct; identical to SEQ ID NO: 1378
  misc_feature 1..645: note = 20H5.A3-VH7VL4 light chain DNA sequence
  source 1..645: mol_type = other DNA

SEQ ID NO: 1400 - DNA, 645 bp, synthetic construct; identical to SEQ ID NO: 1379
  misc_feature 1..645: note = 20H5.A3-VH7VL5 light chain DNA sequence
  source 1..645: mol_type = other DNA

SEQ ID NO: 1401 - DNA, 645 bp, synthetic construct; identical to SEQ ID NO: 1379
  misc_feature 1..645: note = 20H5.A3-VH7VL6 light chain DNA sequence
  source 1..645: mol_type = other DNA

SEQ ID NO: 1402 - DNA, 645 bp, synthetic construct; identical to SEQ ID NO: 919
  misc_feature 1..645: note = 20H5.A3_hVH3VL1-hIgG1 (KEMv2) light chain DNA sequence
  source 1..645: mol_type = other DNA

SEQ ID NO: 1403 - DNA, 645 bp, synthetic construct; identical to SEQ ID NO: 919
  misc_feature 1..645: note = 20H5.A3_hVH3VL1-hIgG1 (LALAPGv2) light chain DNA sequence
  source 1..645: mol_type = other DNA

SEQ ID NO: 1404 - DNA, 645 bp, synthetic construct; identical to SEQ ID NO: 919
  misc_feature 1..645: note = 20H5.A3_hVH3VL1-hIgG1 (REM) light chain DNA sequence
  source 1..645: mol_type = other DNA

SEQ ID NO: 1405 - DNA, 645 bp, synthetic construct; identical to SEQ ID NO: 919
  misc_feature 1..645: note = 20H5.A3_hVH5VL1-hIgG1 (KEMv2) light chain DNA sequence
  source 1..645: mol_type = other DNA

SEQ ID NO: 1406 - DNA, 645 bp, synthetic construct; identical to SEQ ID NO: 919
  misc_feature 1..645: note = 20H5.A3_hVH5VL1-hIgG1 (LALAPGv2) light chain DNA sequence
  source 1..645: mol_type = other DNA

SEQ ID NO: 1407 - DNA, 645 bp, synthetic construct; identical to SEQ ID NO: 919
  misc_feature 1..645: note = 20H5.A3_hVH5VL1-hIgG1 (REM) light chain DNA sequence
  source 1..645: mol_type = other DNA

SEQ ID NO: 1408 - DNA, 645 bp, synthetic construct; identical to SEQ ID NO: 919
  misc_feature 1..645: note = 20H5.A3_hVH6VL1-hIgG1 (KEMv2) light chain DNA sequence
  source 1..645: mol_type = other DNA

SEQ ID NO: 1409 - DNA, 645 bp, synthetic construct; identical to SEQ ID NO: 919
  misc_feature 1..645: note = 20H5.A3_hVH6VL1-hIgG1 (LALAPGv2) light chain DNA sequence
  source 1..645: mol_type = other DNA

SEQ ID NO: 1410 - DNA, 645 bp, synthetic construct; identical to SEQ ID NO: 919
  misc_feature 1..645: note = 20H5.A3_hVH6VL1-hIgG1 (REM) light chain DNA sequence
  source 1..645: mol_type = other DNA

SEQ ID NO: 1411 - protein, 440 aa, synthetic construct
  REGION 1..440: note = F847C.21H6 heavy chain peptide sequence
QIQLVQSGPELKKPGETVKISCKASGYTFTIFGMNWVKQAPGKGLKWMGWVNTYTGEPTYADDFKGRFAFSLETSASTAYLQINNLKNEDTATYFCARGWFAYWGQGTLVTVSAASTKGPSVFPLAPCSRSTSESTAALGCLVKDYFPEPVTVSWNSGALTSGVHTFPAVLQSSGLYSLSSVVTVPSSSLGTKTYTCNVDHKPSNTKVDKRVESKYGPPCPPCPAPEFLGGPSVFLFPPKPKDTLMISRTPEVTCVVVDVSQEDPEVQFNWYVDGVEVHNAKTKPREEQFNSTYRVVSVLTVLHQDWLNGKEYKCKVSNKGLPSSIEKTISKAKGQPREPQVYTLPPSQEEMTKNQVSLTCLVKGFYPSDIAVEWESNGQPENNYKTTPPVLDSDGSFFLYSRLTVDKSRWQEGNVFSCSVMHEALHNHYTQKSLSLSLG

SEQ ID NO: 1412 - protein, 219 aa, synthetic construct
  REGION 1..219: note = F847C.21H6 light chain peptide sequence
DVVMTQTPLTLSVTIGQPASISCKSSRSLLDSDGKTYLNWLLQRPGQSPKRLIYLVSKLDSGVPDRFTGSGSGTDFTLKISRVEAEDLGVYYCWQGTHFPQTFGGGTKLEINRTVAAPSVFIFPPSDEQLKSGTASVVCLLNNFYPREAKVQWKVDNALQSGNSQESVTEQDSKDSTYSLSSTLTLSKADYEKHKVYACEVTHQGLSSPVTKSFNRGEC

SEQ ID NO: 1413 - DNA, 1326 bp, synthetic construct
  misc_feature 1..1326: note = F847C.21H6 heavy chain DNA sequence
  source 1..1326: mol_type = other DNA
cagatccagttggtgcagtctggacctgagctgaagaagcctggagagacagtcaagatctcctgcaaggcttctgggtataccttcacaatctttggaatgaactgggtgaagcaggctccaggaaagggtttaaagtggatgggctgggtaaacacctacactggagagccaacatatgctgatgacttcaagggacggtttgccttctctttggaaacctctgccagcactgcctatttgcagatcaacaacctcaaaaatgaggacacggctacatatttctgtgcaagaggctggtttgcttactggggccaagggactctggtcactgtctctgcagctagcaccaagggccccagcgtgtttcctctcgctccctgcagccggagcacatccgagagcaccgctgctctgggctgtctcgtgaaggactacttccctgaacccgtcaccgtcagctggaatagcggcgccctgacatccggcgtccacacattccccgctgtcctgcagagcagcggcctgtacagcctgagctccgtggtcaccgtgcctagcagcagcctgggaacaaagacctacacctgcaacgtggaccataagccctccaacaccaaggtggacaagcgggtggaatccaagtatggacccccctgtcctccttgccctgctcctgaatttctcggaggcccctccgtcttcctgtttccccccaagcccaaggacaccctgatgatctcccggacacccgaagtcacctgcgtcgtggtggatgtcagccaggaagatcccgaggtgcagttcaactggtacgtggacggagtggaggtgcataacgccaaaaccaagcccagggaagagcagttcaacagcacctatcgggtcgtgtccgtgctcaccgtcctgcatcaggattggctcaacggcaaggagtacaagtgcaaggtgtccaacaagggcctgccctcctccatcgagaagaccatctccaaggctaagggccaacctcgggagccccaagtgtataccctccctcccagccaggaggagatgaccaagaatcaagtgagcctgacctgcctcgtgaagggattttacccctccgacatcgctgtggaatgggaaagcaatggccaacctgagaacaactacaagaccacaccccccgtgctggactccgatggctccttcttcctgtacagcaggctgaccgtggacaaatcccggtggcaagagggaaacgtgttcagctgctccgtgatgcacgaggctctccacaaccactacacccagaagagcctctccctgagcctcggctagtaa

SEQ ID NO: 1414 - DNA, 661 bp, synthetic construct
  misc_feature 1..661: note = F847C.21H6 light chain DNA sequence
  source 1..661: mol_type = other DNA
gatgttgtgatgacccagactccactcactttgtcggttaccattggacaaccagcctccatctcttgcaagtcaagtcggagcctcttagatagtgatggaaagacatatttgaattggttgttacagaggccaggccagtctccaaagcgcctaatctatctggtgtccaaactggactctggagtccctgacaggttcactggcagtggatcagggacagatttcacactgaaaatcagcagagtggaggctgaggatttgggagtttattattgctggcaaggtacacattttcctcagacgttcggtggaggcaccaagctggaaatcaataggaccgtggccgcccccagcgtgttcatcttccctcccagcgacgagcagctgaagtctggcaccgccagcgtggtgtgcctgctgaacaacttctacccccgcgaggccaaggtgcagtggaaggtggacaacgccctgcagagcggcaacagccaggagagcgtgaccgagcaggactccaaggacagcacctacagcctgagcagcaccctgaccctgagcaaggccgactacgagaagcacaaggtgtacgcctgcgaggtgacccaccagggactgtctagccccgtgaccaagagcttcaaccggggcgagtgctaag

SEQ ID NO: 1415 - protein, 114 aa, synthetic construct; identical to SEQ ID NO: 367
  REGION 1..114: note = VH-152 Peptide Sequence

SEQ ID NO: 1416 - protein, 114 aa, synthetic construct
  REGION 1..114: note = VH-153 Peptide Sequence
QVQLVQSGSELKKPGASVKVSCKASGYTFTIFGMNWVRQAPGQGLEWMGWVNTYTGEPTYAQGFTGRFVFSLDTSVSTAYLQISSLKAEDTAVYYCARGWFAYWGQGTLVTVSS

SEQ ID NO: 1417 - protein, 114 aa, synthetic construct; identical to SEQ ID NO: 1416
  REGION 1..114: note = VH-154 Peptide Sequence

SEQ ID NO: 1418 - protein, 114 aa, synthetic construct; identical to SEQ ID NO: 1416
  REGION 1..114: note = VH-155 Peptide Sequence

SEQ ID NO: 1419 - protein, 114 aa, synthetic construct; identical to SEQ ID NO: 1416
  REGION 1..114: note = VH-156 Peptide Sequence

SEQ ID NO: 1420 - protein, 114 aa, synthetic construct
  REGION 1..114: note = VH-157 Peptide Sequence
QIQLVQSGSELKKPGASVKVSCKASGYTFTIFGMNWVRQAPGQGLEWMGWVNTYTGEPTYAQGFTGRFVFSLDTSVSTAYLQISSLKAEDTAVYFCARGWFAYWGQGTLVTVSS

SEQ ID NO: 1421 - protein, 114 aa, synthetic construct; identical to SEQ ID NO: 1420
  REGION 1..114: note = VH-158 Peptide Sequence

SEQ ID NO: 1422 - protein, 114 aa, synthetic construct; identical to SEQ ID NO: 1420
  REGION 1..114: note = VH-159 Peptide Sequence

SEQ ID NO: 1423 - protein, 114 aa, synthetic construct; identical to SEQ ID NO: 1420
  REGION 1..114: note = VH-160 Peptide Sequence

SEQ ID NO: 1424 - protein, 114 aa, synthetic construct
  REGION 1..114: note = VH-161 Peptide Sequence
QIQLVQSGSELKKPGASVKVSCKASGYTFTIFGMNWVRQAPGQGLEWMGWVNTYTGEPTYADDFTGRFVFSLDTSVSTAYLQISSLKAEDTAVYFCARGWFAYWGQGTLVTVSS

SEQ ID NO: 1425 - protein, 114 aa, synthetic construct; identical to SEQ ID NO: 1424
  REGION 1..114: note = VH-162 Peptide Sequence

SEQ ID NO: 1426 - protein, 114 aa, synthetic construct; identical to SEQ ID NO: 1424
  REGION 1..114: note = VH-163 Peptide Sequence

SEQ ID NO: 1427 - protein, 114 aa, synthetic construct; identical to SEQ ID NO: 1424
  REGION 1..114: note = VH-164 Peptide Sequence

SEQ ID NO: 1428 - protein, 114 aa, synthetic construct
  REGION 1..114: note = VH-165 Peptide Sequence
QVQLVQSGSELKKPGASVKVSCKASGYTFTIFGMNWVRQAPGQGLEWMGWVNTYTGEPTYAQGFTGRFVFSLDTSVSMAYLQISSLKAEDTAVYYCARGWFAYWGQGTLVTVSS

SEQ ID NO: 1429 - protein, 114 aa, synthetic construct; identical to SEQ ID NO: 1428
  REGION 1..114: note = VH-166 Peptide Sequence

SEQ ID NO: 1430 - protein, 114 aa, synthetic construct; identical to SEQ ID NO: 1428
  REGION 1..114: note = VH-167 Peptide Sequence

SEQ ID NO: 1431 - protein, 114 aa, synthetic construct; identical to SEQ ID NO: 1428
  REGION 1..114: note = VH-168 Peptide Sequence

SEQ ID NO: 1432 - protein, 114 aa, synthetic construct
  REGION 1..114: note = VH-169 Peptide Sequence
QIQLVQSGSELKKPGASVKVSCKASGYTFTIFGMNWVRQAPGQGLEWMGWVNTYTGEPTYAQGFTGRFVFSLDTSVSMAYLQISSLKAEDTAVYFCARGWFAYWGQGTLVTVSS

SEQ ID NO: 1433 - protein, 114 aa, synthetic construct; identical to SEQ ID NO: 1432
  REGION 1..114: note = VH-170 Peptide Sequence

SEQ ID NO: 1434 - protein, 114 aa, synthetic construct; identical to SEQ ID NO: 1432
  REGION 1..114: note = VH-171 Peptide Sequence

SEQ ID NO: 1435 - protein, 114 aa, synthetic construct; identical to SEQ ID NO: 1432
  REGION 1..114: note = VH-172 Peptide Sequence

SEQ ID NO: 1436 - protein, 114 aa, synthetic construct
  REGION 1..114: note = VH-173 Peptide Sequence
QIQLVQSGSELKKPGASVKVSCKASGYTFTIFGMNWVRQAPGQGLEWMGWVNTYTGEPTYADDFTGRFVFSLDTSVSMAYLQISSLKAEDTAVYFCARGWFAYWGQGTLVTVSS

SEQ ID NO: 1437 - protein, 114 aa, synthetic construct; identical to SEQ ID NO: 1436
  REGION 1..114: note = VH-174 Peptide Sequence

SEQ ID NO: 1438 - protein, 114 aa, synthetic construct; identical to SEQ ID NO: 1436
  REGION 1..114: note = VH-175 Peptide Sequence

SEQ ID NO: 1439 - protein, 114 aa, synthetic construct; identical to SEQ ID NO: 1436
  REGION 1..114: note = VH-176 Peptide Sequence

SEQ ID NO: 1440 - protein, 112 aa, synthetic construct; identical to SEQ ID NO: 440
  REGION 1..112: note = VL-150 Peptide Sequence

SEQ ID NO: 1441 - protein, 112 aa, synthetic construct
  REGION 1..112: note = VL-151 Peptide Sequence
DIVMTQTPLSLSVTPGQPASISCKSSRSLLDSDGKTYLNWYLQKPGQSPQRLIYLVSKLDSGVPDRFSGSGSGTDFTLKISRVEAEDVGVYYCWQGTHFPQTFGGGTKVEIK

SEQ ID NO: 1442 - protein, 112 aa, synthetic construct
  REGION 1..112: note = VL-152 Peptide Sequence
DVVMTQTPLSLSVTPGQPASISCKSSRSLLDSDGKTYLNWLLQKPGQSPQRLIYLVSKLDSGVPDRFSGSGSGTDFTLKISRVEAEDVGVYYCWQGTHFPQTFGGGTKVEIK

SEQ ID NO: 1443 - protein, 112 aa, synthetic construct
  REGION 1..112: note = VL-153 Peptide Sequence
DVVMTQSPLSLPVTLGQPASISCRSSRSLLDSDGKTYLNWFQQRPGQSPRRLIYLVSKLDSGVPDRFSGSGSGTDFTLKISRVEAEDVGVYYCWQGTHFPQTFGGGTKVEIK

SEQ ID NO: 1444 - protein, 112 aa, synthetic construct
  REGION 1..112: note = VL-154 Peptide Sequence
DVVMTQSPLSLPVTLGQPASISCKSSRSLLDSDGKTYLNWLQQRPGQSPRRLIYLVSKLDSGVPDRFSGSGSGTDFTLKISRVEAEDVGVYYCWQGTHFPQTFGGGTKVEIK

SEQ ID NO: 1445 - protein, 112 aa, synthetic construct; identical to SEQ ID NO: 1441
  REGION 1..112: note = VL-155 Peptide Sequence

SEQ ID NO: 1446 - protein, 112 aa, synthetic construct; identical to SEQ ID NO: 1442
  REGION 1..112: note = VL-156 Peptide Sequence

SEQ ID NO: 1447 - protein, 112 aa, synthetic construct; identical to SEQ ID NO: 1443
  REGION 1..112: note = VL-157 Peptide Sequence

SEQ ID NO: 1448 - protein, 112 aa, synthetic construct; identical to SEQ ID NO: 1444
  REGION 1..112: note = VL-158 Peptide Sequence

SEQ ID NO: 1449 - protein, 112 aa, synthetic construct; identical to SEQ ID NO: 1441
  REGION 1..112: note = VL-159 Peptide Sequence

SEQ ID NO: 1450 - protein, 112 aa, synthetic construct; identical to SEQ ID NO: 1442
  REGION 1..112: note = VL-160 Peptide Sequence

SEQ ID NO: 1451 - protein, 112 aa, synthetic construct; identical to SEQ ID NO: 1443
  REGION 1..112: note = VL-161 Peptide Sequence

SEQ ID NO: 1452 - protein, 112 aa, synthetic construct; identical to SEQ ID NO: 1441
  REGION 1..112: note = VL-162 Peptide Sequence

SEQ ID NO: 1453 - protein, 112 aa, synthetic construct; identical to SEQ ID NO: 1441
  REGION 1..112: note = VL-163 Peptide Sequence

SEQ ID NO: 1454 - protein, 112 aa, synthetic construct; identical to SEQ ID NO: 1442
  REGION 1..112: note = VL-164 Peptide Sequence

SEQ ID NO: 1455 - protein, 112 aa, synthetic construct; identical to SEQ ID NO: 1443
  REGION 1..112: note = VL-165 Peptide Sequence

SEQ ID NO: 1456 - protein, 112 aa, synthetic construct; identical to SEQ ID NO: 1444
  REGION 1..112: note = VL-166 Peptide Sequence

SEQ ID NO: 1457 - protein, 112 aa, synthetic construct; identical to SEQ ID NO: 1441
  REGION 1..112: note = VL-167 Peptide Sequence

SEQ ID NO: 1458 - protein, 112 aa, synthetic construct; identical to SEQ ID NO: 1442
  REGION 1..112: note = VL-168 Peptide Sequence

SEQ ID NO: 1459 - protein, 112 aa, synthetic construct; identical to SEQ ID NO: 1443
  REGION 1..112: note = VL-169 Peptide Sequence

SEQ ID NO: 1460 - protein, 112 aa, synthetic construct; identical to SEQ ID NO: 1444
  REGION 1..112: note = VL-170 Peptide Sequence

SEQ ID NO: 1461 - protein, 112 aa, synthetic construct; identical to SEQ ID NO: 1441
  REGION 1..112: note = VL-171 Peptide Sequence

SEQ ID NO: 1462 - protein, 112 aa, synthetic construct; identical to SEQ ID NO: 1442
  REGION 1..112: note = VL-172 Peptide Sequence

SEQ ID NO: 1463 - protein, 112 aa, synthetic construct; identical to SEQ ID NO: 1443
  REGION 1..112: note = VL-173 Peptide Sequence

SEQ ID NO: 1464 - protein, 112 aa, synthetic construct; identical to SEQ ID NO: 1444
  REGION 1..112: note = VL-174 Peptide Sequence

SEQ ID NO: 1465 - protein, 440 aa, synthetic construct; identical to SEQ ID NO: 1411
  REGION 1..440: note = 21H6-H0L0 heavy chain peptide sequence

SEQ ID NO: 1466 - protein, 440 aa, synthetic construct
  REGION 1..440: note = 21H6-H1L1 heavy chain peptide sequence
QVQLVQSGSELKKPGASVKVSCKASGYTFTIFGMNWVRQAPGQGLEWMGWVNTYTGEPTYAQGFTGRFVFSLDTSVSTAYLQISSLKAEDTAVYYCARGWFAYWGQGTLVTVSSASTKGPSVFPLAPCSRSTSESTAALGCLVKDYFPEPVTVSWNSGALTSGVHTFPAVLQSSGLYSLSSVVTVPSSSLGTKTYTCNVDHKPSNTKVDKRVESKYGPPCPPCPAPEFLGGPSVFLFPPKPKDTLMISRTPEVTCVVVDVSQEDPEVQFNWYVDGVEVHNAKTKPREEQFNSTYRVVSVLTVLHQDWLNGKEYKCKVSNKGLPSSIEKTISKAKGQPREPQVYTLPPSQEEMTKNQVSLTCLVKGFYPSDIAVEWESNGQPENNYKTTPPVLDSDGSFFLYSRLTVDKSRWQEGNVFSCSVMHEALHNHYTQKSLSLSLG

SEQ ID NO: 1467 - protein, 440 aa, synthetic construct; identical to SEQ ID NO: 1466
  REGION 1..440: note = 21H6-H1L2 heavy chain peptide sequence

SEQ ID NO: 1468 - protein, 440 aa, synthetic construct; identical to SEQ ID NO: 1466
  REGION 1..440: note = 21H6-H1L3 heavy chain peptide sequence

SEQ ID NO: 1469 - protein, 440 aa, synthetic construct; identical to SEQ ID NO: 1466
  REGION 1..440: note = 21H6-H1L4 heavy chain peptide sequence

SEQ ID NO: 1470 - protein, 440 aa, synthetic construct
  REGION 1..440: note = 21H6-H2L1 heavy chain peptide sequence
QIQLVQSGSELKKPGASVKVSCKASGYTFTIFGMNWVRQAPGQGLEWMGWVNTYTGEPTYAQGFTGRFVFSLDTSVSTAYLQISSLKAEDTAVYFCARGWFAYWGQGTLVTVSSASTKGPSVFPLAPCSRSTSESTAALGCLVKDYFPEPVTVSWNSGALTSGVHTFPAVLQSSGLYSLSSVVTVPSSSLGTKTYTCNVDHKPSNTKVDKRVESKYGPPCPPCPAPEFLGGPSVFLFPPKPKDTLMISRTPEVTCVVVDVSQEDPEVQFNWYVDGVEVHNAKTKPREEQFNSTYRVVSVLTVLHQDWLNGKEYKCKVSNKGLPSSIEKTISKAKGQPREPQVYTLPPSQEEMTKNQVSLTCLVKGFYPSDIAVEWESNGQPENNYKTTPPVLDSDGSFFLYSRLTVDKSRWQEGNVFSCSVMHEALHNHYTQKSLSLSLG

SEQ ID NO: 1471 - protein, 440 aa, synthetic construct; identical to SEQ ID NO: 1470
  REGION 1..440: note = 21H6-H2L2 heavy chain peptide sequence

SEQ ID NO: 1472 - protein, 440 aa, synthetic construct; identical to SEQ ID NO: 1470
  REGION 1..440: note = 21H6-H2L3 heavy chain peptide sequence

SEQ ID NO: 1473 - protein, 440 aa, synthetic construct; identical to SEQ ID NO: 1470
  REGION 1..440: note = 21H6-H2L4 heavy chain peptide sequence

SEQ ID NO: 1474 - protein, 440 aa, synthetic construct
  REGION 1..440: note = 21H6-H3L1 heavy chain peptide sequence
QIQLVQSGSELKKPGASVKVSCKASGYTFTIFGMNWVRQAPGQGLEWMGWVNTYTGEPTYADDFTGRFVFSLDTSVSTAYLQISSLKAEDTAVYFCARGWFAYWGQGTLVTVSSASTKGPSVFPLAPCSRSTSESTAALGCLVKDYFPEPVTVSWNSGALTSGVHTFPAVLQSSGLYSLSSVVTVPSSSLGTKTYTCNVDHKPSNTKVDKRVESKYGPPCPPCPAPEFLGGPSVFLFPPKPKDTLMISRTPEVTCVVVDVSQEDPEVQFNWYVDGVEVHNAKTKPREEQFNSTYRVVSVLTVLHQDWLNGKEYKCKVSNKGLPSSIEKTISKAKGQPREPQVYTLPPSQEEMTKNQVSLTCLVKGFYPSDIAVEWESNGQPENNYKTTPPVLDSDGSFFLYSRLTVDKSRWQEGNVFSCSVMHEALHNHYTQKSLSLSLG

SEQ ID NO: 1475 - protein, 440 aa, synthetic construct; identical to SEQ ID NO: 1474
  REGION 1..440: note = 21H6-H3L2 heavy chain peptide sequence

SEQ ID NO: 1476 - protein, 440 aa, synthetic construct; identical to SEQ ID NO: 1474
  REGION 1..440: note = 21H6-H3L3 heavy chain peptide sequence

SEQ ID NO: 1477 - protein, 440 aa, synthetic construct; identical to SEQ ID NO: 1474
  REGION 1..440: note = 21H6-H3L4 heavy chain peptide sequence

SEQ ID NO: 1478 - protein, 440 aa, synthetic construct
  REGION 1..440: note = 21H6-H4L1 heavy chain peptide sequence
QVQLVQSGSELKKPGASVKVSCKASGYTFTIFGMNWVRQAPGQGLEWMGWVNTYTGEPTYAQGFTGRFVFSLDTSVSMAYLQISSLKAEDTAVYYCARGWFAYWGQGTLVTVSSASTKGPSVFPLAPCSRSTSESTAALGCLVKDYFPEPVTVSWNSGALTSGVHTFPAVLQSSGLYSLSSVVTVPSSSLGTKTYTCNVDHKPSNTKVDKRVESKYGPPCPPCPAPEFLGGPSVFLFPPKPKDTLMISRTPEVTCVVVDVSQEDPEVQFNWYVDGVEVHNAKTKPREEQFNSTYRVVSVLTVLHQDWLNGKEYKCKVSNKGLPSSIEKTISKAKGQPREPQVYTLPPSQEEMTKNQVSLTCLVKGFYPSDIAVEWESNGQPENNYKTTPPVLDSDGSFFLYSRLTVDKSRWQEGNVFSCSVMHEALHNHYTQKSLSLSLG

SEQ ID NO: 1479 - protein, 440 aa, synthetic construct; identical to SEQ ID NO: 1478
  REGION 1..440: note = 21H6-H4L2 heavy chain peptide sequence

SEQ ID NO: 1480 - protein, 440 aa, synthetic construct; identical to SEQ ID NO: 1478
  REGION 1..440: note = 21H6-H4L3 heavy chain peptide sequence

SEQ ID NO: 1481 - protein, 440 aa, synthetic construct; identical to SEQ ID NO: 1478
  REGION 1..440: note = 21H6-H4L4 heavy chain peptide sequence

SEQ ID NO: 1482 - protein, 440 aa, synthetic construct
  REGION 1..440: note = 21H6-H5L1 heavy chain peptide sequence
QIQLVQSGSELKKPGASVKVSCKASGYTFTIFGMNWVRQAPGQGLEWMGWVNTYTGEPTYAQGFTGRFVFSLDTSVSMAYLQISSLKAEDTAVYFCARGWFAYWGQGTLVTVSSASTKGPSVFPLAPCSRSTSESTAALGCLVKDYFPEPVTVSWNSGALTSGVHTFPAVLQSSGLYSLSSVVTVPSSSLGTKTYTCNVDHKPSNTKVDKRVESKYGPPCPPCPAPEFLGGPSVFLFPPKPKDTLMISRTPEVTCVVVDVSQEDPEVQFNWYVDGVEVHNAKTKPREEQFNSTYRVVSVLTVLHQDWLNGKEYKCKVSNKGLPSSIEKTISKAKGQPREPQVYTLPPSQEEMTKNQVSLTCLVKGFYPSDIAVEWESNGQPENNYKTTPPVLDSDGSFFLYSRLTVDKSRWQEGNVFSCSVMHEALHNHYTQKSLSLSLG

SEQ ID NO: 1483 - protein, 440 aa, synthetic construct; identical to SEQ ID NO: 1482
  REGION 1..440: note = 21H6-H5L2 heavy chain peptide sequence

SEQ ID NO: 1484 - protein, 440 aa, synthetic construct; identical to SEQ ID NO: 1482
  REGION 1..440: note = 21H6-H5L3 heavy chain peptide sequence

SEQ ID NO: 1485 - protein, 440 aa, synthetic construct; identical to SEQ ID NO: 1482
  REGION 1..440: note = 21H6-H5L4 heavy chain peptide sequence

SEQ ID NO: 1486 - protein, 440 aa, synthetic construct
  REGION 1..440: note = 21H6-H6L1 heavy chain peptide sequence
QIQLVQSGSELKKPGASVKVSCKASGYTFTIFGMNWVRQAPGQGLEWMGWVNTYTGEPTYADDFTGRFVFSLDTSVSMAYLQISSLKAEDTAVYFCARGWFAYWGQGTLVTVSSASTKGPSVFPLAPCSRSTSESTAALGCLVKDYFPEPVTVSWNSGALTSGVHTFPAVLQSSGLYSLSSVVTVPSSSLGTKTYTCNVDHKPSNTKVDKRVESKYGPPCPPCPAPEFLGGPSVFLFPPKPKDTLMISRTPEVTCVVVDVSQEDPEVQFNWYVDGVEVHNAKTKPREEQFNSTYRVVSVLTVLHQDWLNGKEYKCKVSNKGLPSSIEKTISKAKGQPREPQVYTLPPSQEEMTKNQVSLTCLVKGFYPSDIAVEWESNGQPENNYKTTPPVLDSDGSFFLYSRLTVDKSRWQEGNVFSCSVMHEALHNHYTQKSLSLSLG

SEQ ID NO: 1487 - protein, 440 aa, synthetic construct; identical to SEQ ID NO: 1486
  REGION 1..440: note = 21H6-H6L2 heavy chain peptide sequence

SEQ ID NO: 1488 - protein, 440 aa, synthetic construct; identical to SEQ ID NO: 1486
  REGION 1..440: note = 21H6-H6L3 heavy chain peptide sequence

SEQ ID NO: 1489 - protein, 440 aa, synthetic construct; identical to SEQ ID NO: 1486
  REGION 1..440: note = 21H6-H6L4 heavy chain peptide sequence

SEQ ID NO: 1490 - protein, 219 aa, synthetic construct; identical to SEQ ID NO: 1412
  REGION 1..219: note = 21H6-H0L0 light chain peptide sequence

SEQ ID NO: 1491 - protein, 219 aa, synthetic construct
  REGION 1..219: note = 21H6-H1L1 light chain peptide sequence
DIVMTQTPLSLSVTPGQPASISCKSSRSLLDSDGKTYLNWYLQKPGQSPQRLIYLVSKLDSGVPDRFSGSGSGTDFTLKISRVEAEDVGVYYCWQGTHFPQTFGGGTKVEIKRTVAAPSVFIFPPSDEQLKSGTASVVCLLNNFYPREAKVQWKVDNALQSGNSQESVTEQDSKDSTYSLSSTLTLSKADYEKHKVYACEVTHQGLSSPVTKSFNRGEC

SEQ ID NO: 1492 - protein, 219 aa, synthetic construct
  REGION 1..219: note = 21H6-H1L2 light chain peptide sequence
DVVMTQTPLSLSVTPGQPASISCKSSRSLLDSDGKTYLNWLLQKPGQSPQRLIYLVSKLDSGVPDRFSGSGSGTDFTLKISRVEAEDVGVYYCWQGTHFPQTFGGGTKVEIKRTVAAPSVFIFPPSDEQLKSGTASVVCLLNNFYPREAKVQWKVDNALQSGNSQESVTEQDSKDSTYSLSSTLTLSKADYEKHKVYACEVTHQGLSSPVTKSFNRGEC

SEQ ID NO: 1493 - protein, 219 aa, synthetic construct
  REGION 1..219: note = 21H6-H1L3 light chain peptide sequence
DVVMTQSPLSLPVTLGQPASISCRSSRSLLDSDGKTYLNWFQQRPGQSPRRLIYLVSKLDSGVPDRFSGSGSGTDFTLKISRVEAEDVGVYYCWQGTHFPQTFGGGTKVEIKRTVAAPSVFIFPPSDEQLKSGTASVVCLLNNFYPREAKVQWKVDNALQSGNSQESVTEQDSKDSTYSLSSTLTLSKADYEKHKVYACEVTHQGLSSPVTKSFNRGEC

SEQ ID NO: 1494 - protein, 219 aa, synthetic construct
  REGION 1..219: note = 21H6-H1L4 light chain peptide sequence
DVVMTQSPLSLPVTLGQPASISCKSSRSLLDSDGKTYLNWLQQRPGQSPRRLIYLVSKLDSGVPDRFSGSGSGTDFTLKISRVEAEDVGVYYCWQGTHFPQTFGGGTKVEIKRTVAAPSVFIFPPSDEQLKSGTASVVCLLNNFYPREAKVQWKVDNALQSGNSQESVTEQDSKDSTYSLSSTLTLSKADYEKHKVYACEVTHQGLSSPVTKSFNRGEC

SEQ ID NO: 1495 - protein, 219 aa, synthetic construct; identical to SEQ ID NO: 1491
  REGION 1..219: note = 21H6-H2L1 light chain peptide sequence

SEQ ID NO: 1496 - protein, 219 aa, synthetic construct; identical to SEQ ID NO: 1492
  REGION 1..219: note = 21H6-H2L2 light chain peptide sequence

SEQ ID NO: 1497 - protein, 219 aa, synthetic construct; identical to SEQ ID NO: 1493
  REGION 1..219: note = 21H6-H2L3 light chain peptide sequence

SEQ ID NO: 1498 - protein, 219 aa, synthetic construct; identical to SEQ ID NO: 1494
  REGION 1..219: note = 21H6-H2L4 light chain peptide sequence

SEQ ID NO: 1499 - protein, 219 aa, synthetic construct; identical to SEQ ID NO: 1491
  REGION 1..219: note = 21H6-H3L1 light chain peptide sequence

SEQ ID NO: 1500 - protein, 219 aa, synthetic construct; identical to SEQ ID NO: 1492
  REGION 1..219: note = 21H6-H3L2 light chain peptide sequence

SEQ ID NO: 1501 - protein, 219 aa, synthetic construct; identical to SEQ ID NO: 1493
  REGION 1..219: note = 21H6-H3L3 light chain peptide sequence

SEQ ID NO: 1502 - protein, 219 aa, synthetic construct; identical to SEQ ID NO: 1491
  REGION 1..219: note = 21H6-H3L4 light chain peptide sequence

SEQ ID NO: 1503 - protein, 219 aa, synthetic construct; identical to SEQ ID NO: 1491
  REGION 1..219: note = 21H6-H4L1 light chain peptide sequence

SEQ ID NO: 1504 - protein, 219 aa, synthetic construct; identical to SEQ ID NO: 1492
  REGION 1..219: note = 21H6-H4L2 light chain peptide sequence

SEQ ID NO: 1505 - protein, 219 aa, synthetic construct; identical to SEQ ID NO: 1493
  REGION 1..219: note = 21H6-H4L3 light chain peptide sequence

SEQ ID NO: 1506 - protein, 219 aa, synthetic construct; identical to SEQ ID NO: 1494
  REGION 1..219: note = 21H6-H4L4 light chain peptide sequence

SEQ ID NO: 1507 - protein, 219 aa, synthetic construct; identical to SEQ ID NO: 1491
  REGION 1..219: note = 21H6-H5L1 light chain peptide sequence

SEQ ID NO: 1508 - protein, 219 aa, synthetic construct; identical to SEQ ID NO: 1492
  REGION 1..219: note = 21H6-H5L2 light chain peptide sequence

SEQ ID NO: 1509 - protein, 219 aa, synthetic construct; identical to SEQ ID NO: 1493
  REGION 1..219: note = 21H6-H5L3 light chain peptide sequence

SEQ ID NO: 1510 - protein, 219 aa, synthetic construct; identical to SEQ ID NO: 1494
  REGION 1..219: note = 21H6-H5L4 light chain peptide sequence

SEQ ID NO: 1511 - protein, 219 aa, synthetic construct; identical to SEQ ID NO: 1491
  REGION 1..219: note = 21H6-H6L1 light chain peptide sequence

SEQ ID NO: 1512 - protein, 219 aa, synthetic construct; identical to SEQ ID NO: 1492
  REGION 1..219: note = 21H6-H6L2 light chain peptide sequence

SEQ ID NO: 1513 - protein, 219 aa, synthetic construct; identical to SEQ ID NO: 1493
  REGION 1..219: note = 21H6-H6L3 light chain peptide sequence

SEQ ID NO: 1514 - protein, 219 aa, synthetic construct; identical to SEQ ID NO: 1494
  REGION 1..219: note = 21H6-H6L4 light chain peptide sequence

SEQ ID NO: 1515 - DNA, 342 bp, synthetic construct
  misc_feature 1..342: note = 21H6-H0L0 VH DNA sequence
  source 1..342: mol_type = other DNA
cagatccagcttgtacagtctgggcctgaacttaaaaagcccggggaaacagtgaagatctcctgtaaggcttctgggtacacttttacgatctttggaatgaactgggtcaagcaggctcccggaaaaggtctgaagtggatgggctgggtgaatacatacacgggggaacccacctatgctgacgattttaaggggcggttcgctttctctctcgaaaccagcgcgagtacagcatacttacagatcaacaacttgaagaacgaagatacagctacgtatttctgtgctagagggtggttcgcgtattgggggcaaggcactctcgtcaccgtatccgcc

SEQ ID NO: 1516 - DNA, 342 bp, synthetic construct
  misc_feature 1..342: note = 21H6-H1L1 VH DNA sequence
  source 1..342: mol_type = other DNA
caggtgcagctcgtacaaagcgggtcagagttaaagaagcctggggccagtgtgaaagtcagttgcaaagcgtccggttacactttcacaatcttcggaatgaactgggtgcgccaggctcccggccaaggattggagtggatgggatgggtcaatacatacaccggcgagcctacttatgcccagggttttaccgggaggtttgtgttctccttagatacatccgtgagtacggcttatctgcaaatctcttctctcaaggcggaagacactgcggtatattactgtgcgcggggatggttcgcatactggggacaaggcaccctcgtgaccgtgagcagc

SEQ ID NO: 1517 - DNA, 342 bp, synthetic construct; identical to SEQ ID NO: 1516
  misc_feature 1..342: note = 21H6-H1L2 VH DNA sequence
  source 1..342: mol_type = other DNA

SEQ ID NO: 1518 - DNA, 342 bp, synthetic construct; identical to SEQ ID NO: 1516
  misc_feature 1..342: note = 21H6-H1L3 VH DNA sequence
  source 1..342: mol_type = other DNA

SEQ ID NO: 1519 - DNA, 342 bp, synthetic construct; identical to SEQ ID NO: 1516
  misc_feature 1..342: note = 21H6-H1L4 VH DNA sequence
  source 1..342: mol_type = other DNA

SEQ ID NO: 1520 - DNA, 342 bp, synthetic construct
  misc_feature 1..342: note = 21H6-H2L1 VH DNA sequence
  source 1..342: mol_type = other DNA
cagatccagcttgtccagtctggatccgagttaaaaaaacctggcgccagcgttaaggtttcctgcaaagcaagtggttacacgtttacaatcttcggaatgaattgggtgcgtcaagctcccggacaaggactcgaatggatgggatgggtgaacacatacacgggcgagcctacctacgctcagggcttcacaggccgatttgtgttctccctggacacgagcgtctccactgcatatttgcaaatatccagtcttaaggcagaggacaccgctgtgtatttttgtgcacgagggtggtttgcctattggggccagggaacactggttactgtctcaagt

SEQ ID NO: 1521 - DNA, 342 bp, synthetic construct; identical to SEQ ID NO: 1520
  misc_feature 1..342: note = 21H6-H2L2 VH DNA sequence
  source 1..342: mol_type = other DNA

SEQ ID NO: 1522 - DNA, 342 bp, synthetic construct; identical to SEQ ID NO: 1520
  misc_feature 1..342: note = 21H6-H2L3 VH DNA sequence
  source 1..342: mol_type = other DNA

SEQ ID NO: 1523 - DNA, 342 bp, synthetic construct; identical to SEQ ID NO: 1520
  misc_feature 1..342: note = 21H6-H2L4 VH DNA sequence
  source 1..342: mol_type = other DNA

SEQ ID NO: 1524 - DNA, 342 bp, synthetic construct
  misc_feature 1..342: note = 21H6-H3L1 VH DNA sequence
  source 1..342: mol_type = other DNA
cagattcagctggtgcagagcggctcagaacttaagaagcccggcgccagtgtgaaagtgagttgtaaggccagcggatacactttcactatctttggcatgaattgggtgcggcaggcccccggtcagggactggagtggatggggtgggtgaatacatacactggagaacctacctacgcggacgacttcacaggacggttcgtcttctccttagacacctctgtcagcacagcttacctccagattagttccctgaaggctgaagatacggcagtatacttttgcgctagaggctggtttgcctactgggggcagggtacgcttgtgacagtgtcttct

SEQ ID NO: 1525 - DNA, 342 bp, synthetic construct; identical to SEQ ID NO: 1524
  misc_feature 1..342: note = 21H6-H3L2 VH DNA sequence
  source 1..342: mol_type = other DNA

SEQ ID NO: 1526 - DNA, 342 bp, synthetic construct; identical to SEQ ID NO: 1524
  misc_feature 1..342: note = 21H6-H3L3 VH DNA sequence
  source 1..342: mol_type = other DNA

SEQ ID NO: 1527 - DNA, 342 bp, synthetic construct; identical to SEQ ID NO: 1524
  misc_feature 1..342: note = 21H6-H3L4 VH DNA sequence
  source 1..342: mol_type = other DNA

SEQ ID NO: 1528 - DNA, 342 bp, synthetic construct
  misc_feature 1..342: note = 21H6-H4L1 VH DNA sequence
  source 1..342: mol_type = other DNA
caggtgcaactcgtccagtcagggtccgagctgaagaaacccggagcgtccgtgaaggtgtcctgtaaagcctctggctacacattcaccatattcgggatgaactgggtgcgtcaggccccagggcagggattagagtggatgggttgggtgaacacctacacaggggagccaacttacgcccaggggttcacgggcagatttgtatttagcctcgacacctccgtttcaatggcctatctccagatttcaagccttaaagctgaggacactgctgtgtactactgcgcccgcggttggtttgcatactggggccagggaacccttgtcaccgtgtcttcc

SEQ ID NO: 1529 - DNA, 342 bp, synthetic construct; identical to SEQ ID NO: 1528
  misc_feature 1..342: note = 21H6-H4L2 VH DNA sequence
  source 1..342: mol_type = other DNA

SEQ ID NO: 1530 - DNA, 342 bp, synthetic construct; identical to SEQ ID NO: 1528
  misc_feature 1..342: note = 21H6-H4L3 VH DNA sequence
  source 1..342: mol_type = other DNA

SEQ ID NO: 1531 - DNA, 342 bp, synthetic construct; identical to SEQ ID NO: 1528
  misc_feature 1..342: note = 21H6-H4L4 VH DNA sequence
  source 1..342: mol_type = other DNA

SEQ ID NO: 1532 - DNA, 342 bp, synthetic construct
  misc_feature 1..342: note = 21H6-H5L1 VH DNA sequence
  source 1..342: mol_type = other DNA
cagatccagttggtccagtccggaagtgagctgaagaagcctggtgccagtgtcaaagtttcctgcaaagcctctggatataccttcaccattttcggtatgaactgggtccgacaagctccggggcaggggctcgaatggatggggtgggtgaatacatacacaggcgaaccaacatacgcacagggatttacaggtcggttcgtcttttccctggacacatctgtttccatggcctatctgcagatctctagcctgaaggctgaagataccgccgtatatttctgtgcacgggggtggttcgcctactgggggcagggcacccttgtgactgtgtctagc

SEQ ID NO: 1533 - DNA, 342 bp, synthetic construct; identical to SEQ ID NO: 1532
  misc_feature 1..342: note = 21H6-H5L2 VH DNA sequence
  source 1..342: mol_type = other DNA

SEQ ID NO: 1534 - DNA, 342 bp, synthetic construct; identical to SEQ ID NO: 1532
  misc_feature 1..342: note = 21H6-H5L3 VH DNA sequence
  source 1..342: mol_type = other DNA

SEQ ID NO: 1535 - DNA, 342 bp, synthetic construct; identical to SEQ ID NO: 1532
  misc_feature 1..342: note = 21H6-H5L4 VH DNA sequence
  source 1..342: mol_type = other DNA

SEQ ID NO: 1536 - DNA, 342 bp, synthetic construct
  misc_feature 1..342: note = 21H6-H6L1 VH DNA sequence
  source 1..342: mol_type = other DNA
cagatccagctggtccagagtggctccgagctgaaaaagcctggagcttctgtgaaagtctcctgcaaagcttctggctacacatttactatctttgggatgaactgggtaaggcaggccccaggccaaggactggagtggatgggctgggttaatacctacacaggcgagcccacgtacgctgacgacttcacagggaggtttgtgttttccctggatacctccgttagcatggcctatttgcagattagttccctgaaggcagaggatactgccgtgtacttttgtgcacgaggatggtttgcctattggggccagggtaccttggtgaccgtctccagc

SEQ ID NO: 1537 - DNA, 342 bp, synthetic construct; identical to SEQ ID NO: 1536
  misc_feature 1..342: note = 21H6-H6L2 VH DNA sequence
  source 1..342: mol_type = other DNA

SEQ ID NO: 1538 - DNA, 342 bp, synthetic construct; identical to SEQ ID NO: 1536
  misc_feature 1..342: note = 21H6-H6L3 VH DNA sequence
  source 1..342: mol_type = other DNA

SEQ ID NO: 1539 - DNA, 342 bp, synthetic construct; identical to SEQ ID NO: 1536
  misc_feature 1..342: note = 21H6-H6L4 VH DNA sequence
  source 1..342: mol_type = other DNA

SEQ ID NO: 1540 - DNA, 336 bp, synthetic construct
  misc_feature 1..336: note = 21H6-H0L0 VL DNA sequence
  source 1..336: mol_type = other DNA
gatgtcgttatgactcagaccccactcacgctctcagtgaccatcggacagcctgccagcatctcatgtaaaagtagtcgcagcctgttagattctgacggcaagacctatctgaactggctgctgcagcgtcctggccagagcccaaaaaggctgatctatctcgtctcaaagctggattcaggagtccccgatcggtttacgggtagcggatctggcaccgacttcacactgaagatttctcgggttgaagccgaagatttgggcgtctactattgctggcaaggaacacacttccctcagacctttggcggcggcacaaagctggaaattaat

SEQ ID NO: 1541 - DNA, 336 bp, synthetic construct
  misc_feature 1..336: note = 21H6-H1L1 VL DNA sequence
  source 1..336: mol_type = other DNA
gatatagtgatgacacagacccccctgtctctctcagttacccccggacaacccgcctctatcagttgcaagagtagtcgctctctgctcgattccgacggaaagacttatctgaattggtatttacaaaaacctgggcagagtccccagcgccttatatatctcgtgtccaaactcgatagcggcgtgcctgaccggttcagcggttcaggctccgggaccgactttacactgaagattagtagggtcgaggcagaagacgtcggtgtttattactgttggcagggcacccatttccctcagacgtttggcggaggtaccaaggtagagataaag

SEQ ID NO: 1542 - DNA, 336 bp, synthetic construct
  misc_feature 1..336: note = 21H6-H1L2 VL DNA sequence
  source 1..336: mol_type = other DNA
gatgtggtgatgactcagactcctctgagcctgtccgtgaccccaggacaacctgcttccatttcctgtaaatcctcccgttccttattggatagcgacgggaagacatacctgaactggctgctgcagaaacccgggcagtccccgcagagattaatatatctggtatctaagctggatagtggtgtaccagatcggtttagcggatccggctcaggtaccgacttcacgctcaagatctccagggtggaggctgaggatgtaggagtatactactgttggcaggggacccattttcctcaaacatttggggggggaacaaaggtagagatcaag

SEQ ID NO: 1543 - DNA, 336 bp, synthetic construct
  misc_feature 1..336: note = 21H6-H1L3 VL DNA sequence
  source 1..336: mol_type = other DNA
gatgtggtgatgactcagtctccactcagcctgcctgtaaccttagggcaacctgcctccatcagttgtcgctccagtcgttctctgctggattcagacggtaaaacctatctgaattggttccagcagcgtccaggacagtctccacgccgactgatatatctcgtgagtaagttggattcaggcgtgcccgatcgcttcagtggcagcgggtctgggactgactttaccctgaaaatatcccgcgtggaggcggaagatgtcggggtatattactgttggcagggtacacatttcccacagacattcgggggaggcactaaggtggaaattaaa

SEQ ID NO: 1544 - DNA, 336 bp, synthetic construct
  misc_feature 1..336: note = 21H6-H1L4 VL DNA sequence
  source 1..336: mol_type = other DNA
gacgtggtgatgacacagagcccgctgtctctcccggtaacgctgggccagccggcgtctattagctgtaagagtagccgaagtctccttgatagcgacggaaaaacctatctgaactggcttcagcaacgccctgggcagtccccccgccgcctgatttatctggtgtccaaactggacagcggcgtgcccgacaggttctccgggagcggtagcggtactgactttacgctcaagatttcccgcgtggaggccgaggatgtcggggtatattactgctggcaggggacgcattttccgcagacctttggcggaggcaccaaagtggagatcaaa

SEQ ID NO: 1545 - DNA, 336 bp, synthetic construct; identical to SEQ ID NO: 1541
  misc_feature 1..336: note = 21H6-H2L1 VL DNA sequence
  source 1..336: mol_type = other DNA

SEQ ID NO: 1546 - DNA, 336 bp, synthetic construct; identical to SEQ ID NO: 1542
  misc_feature 1..336: note = 21H6-H2L2 VL DNA sequence
  source 1..336: mol_type = other DNA

SEQ ID NO: 1547 - DNA, 336 bp, synthetic construct; identical to SEQ ID NO: 1543
  misc_feature 1..336: note = 21H6-H2L3 VL DNA sequence
  source 1..336: mol_type = other DNA

SEQ ID NO: 1548 - DNA, 336 bp, synthetic construct; identical to SEQ ID NO: 1544
  misc_feature 1..336: note = 21H6-H2L4 VL DNA sequence
  source 1..336: mol_type = other DNA

SEQ ID NO: 1549 - DNA, 336 bp, synthetic construct; identical to SEQ ID NO: 1541
  misc_feature 1..336: note = 21H6-H3L1 VL DNA sequence
  source 1..336: mol_type = other DNA

SEQ ID NO: 1550 - DNA, 336 bp, synthetic construct; identical to SEQ ID NO: 1542
  misc_feature 1..336: note = 21H6-H3L2 VL DNA sequence
  source 1..336: mol_type = other DNA

SEQ ID NO: 1551 - DNA, 336 bp, synthetic construct; identical to SEQ ID NO: 1543
  misc_feature 1..336: note = 21H6-H3L3 VL DNA sequence
  source 1..336: mol_type = other DNA

SEQ ID NO: 1552 - DNA, 336 bp, synthetic construct; identical to SEQ ID NO: 1544
  misc_feature 1..336: note = 21H6-H3L4 VL DNA sequence
  source 1..336: mol_type = other DNA

SEQ ID NO: 1553 - DNA, 336 bp, synthetic construct; identical to SEQ ID NO: 1541
  misc_feature 1..336: note = 21H6-H4L1 VL DNA sequence
  source 1..336: mol_type = other DNA

SEQ ID NO: 1554 - DNA, 336 bp, synthetic construct; identical to SEQ ID NO: 1542
  misc_feature 1..336: note = 21H6-H4L2 VL DNA sequence
  source 1..336: mol_type = other DNA

SEQ ID NO: 1555 - DNA, 336 bp, synthetic construct; identical to SEQ ID NO: 1543
  misc_feature 1..336: note = 21H6-H4L3 VL DNA sequence
  source 1..336: mol_type = other DNA

SEQ ID NO: 1556 - DNA, 336 bp, synthetic construct; identical to SEQ ID NO: 1544
  misc_feature 1..336: note = 21H6-H4L4 VL DNA sequence
  source 1..336: mol_type = other DNA

SEQ ID NO: 1557 - DNA, 336 bp, synthetic construct; identical to SEQ ID NO: 1541
  misc_feature 1..336: note = 21H6-H5L1 VL DNA sequence
  source 1..336: mol_type = other DNA

SEQ ID NO: 1558 - DNA, 336 bp, synthetic construct; identical to SEQ ID NO: 1542
  misc_feature 1..336: note = 21H6-H5L2 VL DNA sequence
  source 1..336: mol_type = other DNA

SEQ ID NO: 1559 - DNA, 336 bp, synthetic construct; identical to SEQ ID NO: 1543
  misc_feature 1..336: note = 21H6-H5L3 VL DNA sequence
  source 1..336: mol_type = other DNA

SEQ ID NO: 1560 - DNA, 336 bp, synthetic construct; identical to SEQ ID NO: 1544
  misc_feature 1..336: note = 21H6-H5L4 VL DNA sequence
  source 1..336: mol_type = other DNA

SEQ ID NO: 1561 - DNA, 336 bp, synthetic construct; identical to SEQ ID NO: 1541
  misc_feature 1..336: note = 21H6-H6L1 VL DNA sequence
  source 1..336: mol_type = other DNA

SEQ ID NO: 1562 - DNA, 336 bp, synthetic construct; identical to SEQ ID NO: 1542
  misc_feature 1..336: note = 21H6-H6L2 VL DNA sequence
  source 1..336: mol_type = other DNA

SEQ ID NO: 1563 - DNA, 336 bp, synthetic construct; identical to SEQ ID NO: 1543
  misc_feature 1..336: note = 21H6-H6L3 VL DNA sequence
  source 1..336: mol_type = other DNA

SEQ ID NO: 1564 - DNA, 336 bp, synthetic construct; identical to SEQ ID NO: 1544
  misc_feature 1..336: note = 21H6-H6L4 VL DNA sequence
  source 1..336: mol_type = other DNA

SEQ ID NO: 1565 - DNA, 1326 bp, synthetic construct
  misc_feature 1..1326: note = 21H6-H0L0 heavy chain DNA sequence
  source 1..1326: mol_type = other DNA
cagatccagcttgtacagtctgggcctgaacttaaaaagcccggggaaacagtgaagatctcctgtaaggcttctgggtacacttttacgatctttggaatgaactgggtcaagcaggctcccggaaaaggtctgaagtggatgggctgggtgaatacatacacgggggaacccacctatgctgacgattttaaggggcggttcgctttctctctcgaaaccagcgcgagtacagcatacttacagatcaacaacttgaagaacgaagatacagctacgtatttctgtgctagagggtggttcgcgtattgggggcaaggcactctcgtcaccgtatccgccgctagcaccaagggccccagcgtgtttcctctcgctccctgcagccggagcacatccgagagcaccgctgctctgggctgtctcgtgaaggactacttccctgaacccgtcaccgtcagctggaatagcggcgccctgacatccggcgtccacacattccccgctgtcctgcagagcagcggcctgtacagcctgagctccgtggtcaccgtgcctagcagcagcctgggaacaaagacctacacctgcaacgtggaccataagccctccaacaccaaggtggacaagcgggtggaatccaagtatggacccccctgtcctccttgccctgctcctgaatttctcggaggcccctccgtcttcctgtttccccccaagcccaaggacaccctgatgatctcccggacacccgaagtcacctgcgtcgtggtggatgtcagccaggaagatcccgaggtgcagttcaactggtacgtggacggagtggaggtgcataacgccaaaaccaagcccagggaagagcagttcaacagcacctatcgggtcgtgtccgtgctcaccgtcctgcatcaggattggctcaacggcaaggagtacaagtgcaaggtgtccaacaagggcctgccctcctccatcgagaagaccatctccaaggctaagggccaacctcgggagccccaagtgtataccctccctcccagccaggaggagatgaccaagaatcaagtgagcctgacctgcctcgtgaagggattttacccctccgacatcgctgtggaatgggaaagcaatggccaacctgagaacaactacaagaccacaccccccgtgctggactccgatggctccttcttcctgtacagcaggctgaccgtggacaaatcccggtggcaagagggaaacgtgttcagctgctccgtgatgcacgaggctctccacaaccactacacccagaagagcctctccctgagcctcggctagtaa

SEQ ID NO: 1566 - DNA, 1326 bp, synthetic construct
  misc_feature 1..1326: note = 21H6-H1L1 heavy chain DNA sequence
  source 1..1326: mol_type = other DNA
caggtgcagctcgtacaaagcgggtcagagttaaagaagcctggggccagtgtgaaagtcagttgcaaagcgtccggttacactttcacaatcttcggaatgaactgggtgcgccaggctcccggccaaggattggagtggatgggatgggtcaatacatacaccggcgagcctacttatgcccagggttttaccgggaggtttgtgttctccttagatacatccgtgagtacggcttatctgcaaatctcttctctcaaggcggaagacactgcggtatattactgtgcgcggggatggttcgcatactggggacaaggcaccctcgtgaccgtgagcagcgctagcaccaagggccccagcgtgtttcctctcgctccctgcagccggagcacatccgagagcaccgctgctctgggctgtctcgtgaaggactacttccctgaacccgtcaccgtcagctggaatagcggcgccctgacatccggcgtccacacattccccgctgtcctgcagagcagcggcctgtacagcctgagctccgtggtcaccgtgcctagcagcagcctgggaacaaagacctacacctgcaacgtggaccataagccctccaacaccaaggtggacaagcgggtggaatccaagtatggacccccctgtcctccttgccctgctcctgaatttctcggaggcccctccgtcttcctgtttccccccaagcccaaggacaccctgatgatctcccggacacccgaagtcacctgcgtcgtggtggatgtcagccaggaagatcccgaggtgcagttcaactggtacgtggacggagtggaggtgcataacgccaaaaccaagcccagggaagagcagttcaacagcacctatcgggtcgtgtccgtgctcaccgtcctgcatcaggattggctcaacggcaaggagtacaagtgcaaggtgtccaacaagggcctgccctcctccatcgagaagaccatctccaaggctaagggccaacctcgggagccccaagtgtataccctccctcccagccaggaggagatgaccaagaatcaagtgagcctgacctgcctcgtgaagggattttacccctccgacatcgctgtggaatgggaaagcaatggccaacctgagaacaactacaagaccacaccccccgtgctggactccgatggctccttcttcctgtacagcaggctgaccgtggacaaatcccggtggcaagagggaaacgtgttcagctgctccgtgatgcacgaggctctccacaaccactacacccagaagagcctctccctgagcctcggctagtaa

SEQ ID NO: 1567 - DNA, 1326 bp, synthetic construct; identical to SEQ ID NO: 1566
  misc_feature 1..1326: note = 21H6-H1L2 heavy chain DNA sequence
  source 1..1326: mol_type = other DNA

SEQ ID NO: 1568 - DNA, 1326 bp, synthetic construct; identical to SEQ ID NO: 1566
  misc_feature 1..1326: note = 21H6-H1L3 heavy chain DNA sequence
  source 1..1326: mol_type = other DNA

SEQ ID NO: 1569 - DNA, 1326 bp, synthetic construct; identical to SEQ ID NO: 1566
  misc_feature 1..1326: note = 21H6-H1L4 heavy chain DNA sequence
  source 1..1326: mol_type = other DNA

SEQ ID NO: 1570 - DNA, 1326 bp, synthetic construct
  misc_feature 1..1326: note = 21H6-H2L1 heavy chain DNA sequence
  source 1..1326: mol_type = other DNA
cagatccagcttgtccagtctggatccgagttaaaaaaacctggcgccagcgttaaggtttcctgcaaagcaagtggttacacgtttacaatcttcggaatgaattgggtgcgtcaagctcccggacaaggactcgaatggatgggatgggtgaacacatacacgggcgagcctacctacgctcagggcttcacaggccgatttgtgttctccctggacacgagcgtctccactgcatatttgcaaatatccagtcttaaggcagaggacaccgctgtgtatttttgtgcacgagggtggtttgcctattggggccagggaacactggttactgtctcaagtgctagcaccaagggccccagcgtgtttcctctcgctccctgcagccggagcacatccgagagcaccgctgctctgggctgtctcgtgaaggactacttccctgaacccgtcaccgtcagctggaatagcggcgccctgacatccggcgtccacacattccccgctgtcctgcagagcagcggcctgtacagcctgagctccgtggtcaccgtgcctagcagcagcctgggaacaaagacctacacctgcaacgtggaccataagccctccaacaccaaggtggacaagcgggtggaatccaagtatggacccccctgtcctccttgccctgctcctgaatttctcggaggcccctccgtcttcctgtttccccccaagcccaaggacaccctgatgatctcccggacacccgaagtcacctgcgtcgtggtggatgtcagccaggaagatcccgaggtgcagttcaactggtacgtggacggagtggaggtgcataacgccaaaaccaagcccagggaagagcagttcaacagcacctatcgggtcgtgtccgtgctcaccgtcctgcatcaggattggctcaacggcaaggagtacaagtgcaaggtgtccaacaagggcctgccctcctccatcgagaagaccatctccaaggctaagggccaacctcgggagccccaagtgtataccctccctcccagccaggaggagatgaccaagaatcaagtgagcctgacctgcctcgtgaagggattttacccctccgacatcgctgtggaatgggaaagcaatggccaacctgagaacaactacaagaccacaccccccgtgctggactccgatggctccttcttcctgtacagcaggctgaccgtggacaaatcccggtggcaagagggaaacgtgttcagctgctccgtgatgcacgaggctctccacaaccactacacccagaagagcctctccctgagcctcggctagtaa

SEQ ID NO: 1571 - DNA, 1326 bp, synthetic construct; identical to SEQ ID NO: 1570
  misc_feature 1..1326: note = 21H6-H2L2 heavy chain DNA sequence
  source 1..1326: mol_type = other DNA

SEQ ID NO: 1572 - DNA, 1326 bp, synthetic construct; identical to SEQ ID NO: 1570
  misc_feature 1..1326: note = 21H6-H2L3 heavy chain DNA sequence
  source 1..1326: mol_type = other DNA

SEQ ID NO: 1573 - DNA, 1326 bp, synthetic construct; identical to SEQ ID NO: 1570
  misc_feature 1..1326: note = 21H6-H2L4 heavy chain DNA sequence
  source 1..1326: mol_type = other DNA

SEQ ID NO: 1574 - DNA, 1326 bp, synthetic construct
  misc_feature 1..1326: note = 21H6-H3L1 heavy chain DNA sequence
  source 1..1326: mol_type = other DNA
cagattcagctggtgcagagcggctcagaacttaagaagcccggcgccagtgtgaaagtgagttgtaaggccagcggatacactttcactatctttggcatgaattgggtgcggcaggcccccggtcagggactggagtggatggggtgggtgaatacatacactggagaacctacctacgcggacgacttcacaggacggttcgtcttctccttagacacctctgtcagcacagcttacctccagattagttccctgaaggctgaagatacggcagtatacttttgcgctagaggctggtttgcctactgggggcagggtacgcttgtgacagtgtcttctgctagcaccaagggccccagcgtgtttcctctcgctccctgcagccggagcacatccgagagcaccgctgctctgggctgtctcgtgaaggactacttccctgaacccgtcaccgtcagctggaatagcggcgccctgacatccggcgtccacacattccccgctgtcctgcagagcagcggcctgtacagcctgagctccgtggtcaccgtgcctagcagcagcctgggaacaaagacctacacctgcaacgtggaccataagccctccaacaccaaggtggacaagcgggtggaatccaagtatggacccccctgtcctccttgccctgctcctgaatttctcggaggcccctccgtcttcctgtttccccccaagcccaaggacaccctgatgatctcccggacacccgaagtcacctgcgtcgtggtggatgtcagccaggaagatcccgaggtgcagttcaactggtacgtggacggagtggaggtgcataacgccaaaaccaagcccagggaagagcagttcaacagcacctatcgggtcgtgtccgtgctcaccgtcctgcatcaggattggctcaacggcaaggagtacaagtgcaaggtgtccaacaagggcctgccctcctccatcgagaagaccatctccaaggctaagggccaacctcgggagccccaagtgtataccctccctcccagccaggaggagatgaccaagaatcaagtgagcctgacctgcctcgtgaagggattttacccctccgacatcgctgtggaatgggaaagcaatggccaacctgagaacaactacaagaccacaccccccgtgctggactccgatggctccttcttcctgtacagcaggctgaccgtggacaaatcccggtggcaagagggaaacgtgttcagctgctccgtgatgcacgaggctctccacaaccactacacccagaagagcctctccctgagcctcggctagtaa

SEQ ID NO: 1575 - DNA, 1326 bp, synthetic construct; identical to SEQ ID NO: 1574
  misc_feature 1..1326: note = 21H6-H3L2 heavy chain DNA sequence
  source 1..1326: mol_type = other DNA

SEQ ID NO: 1576 - DNA, 1326 bp, synthetic construct; identical to SEQ ID NO: 1574
  misc_feature 1..1326: note = 21H6-H3L3 heavy chain DNA sequence
  source 1..1326: mol_type = other DNA

SEQ ID NO: 1577 - DNA, 1326 bp, synthetic construct; identical to SEQ ID NO: 1574
  misc_feature 1..1326: note = 21H6-H3L4 heavy chain DNA sequence
  source 1..1326: mol_type = other DNA

SEQ ID NO: 1578 - DNA, 1326 bp, synthetic construct
  misc_feature 1..1326: note = 21H6-H4L1 heavy chain DNA sequence
  source 1..1326: mol_type = other DNA
caggtgcaactcgtccagtcagggtccgagctgaagaaacccggagcgtccgtgaaggtgtcctgtaaagcctctggctacacattcaccatattcgggatgaactgggtgcgtcaggccccagggcagggattagagtggatgggttgggtgaacacctacacaggggagccaacttacgcccaggggttcacgggcagatttgtatttagcctcgacacctccgtttcaatggcctatctccagatttcaagccttaaagctgaggacactgctgtgtactactgcgcccgcggttggtttgcatactggggccagggaacccttgtcaccgtgtcttccgctagcaccaagggccccagcgtgtttcctctcgctccctgcagccggagcacatccgagagcaccgctgctctgggctgtctcgtgaaggactacttccctgaacccgtcaccgtcagctggaatagcggcgccctgacatccggcgtccacacattccccgctgtcctgcagagcagcggcctgtacagcctgagctccgtggtcaccgtgcctagcagcagcctgggaacaaagacctacacctgcaacgtggaccataagccctccaacaccaaggtggacaagcgggtggaatccaagtatggacccccctgtcctccttgccctgctcctgaatttctcggaggcccctccgtcttcctgtttccccccaagcccaaggacaccctgatgatctcccggacacccgaagtcacctgcgtcgtggtggatgtcagccaggaagatcccgaggtgcagttcaactggtacgtggacggagtggaggtgcataacgccaaaaccaagcccagggaagagcagttcaacagcacctatcgggtcgtgtccgtgctcaccgtcctgcatcaggattggctcaacggcaaggagtacaagtgcaaggtgtccaacaagggcctgccctcctccatcgagaagaccatctccaaggctaagggccaacctcgggagccccaagtgtataccctccctcccagccaggaggagatgaccaagaatcaagtgagcctgacctgcctcgtgaagggattttacccctccgacatcgctgtggaatgggaaagcaatggccaacctgagaacaactacaagaccacaccccccgtgctggactccgatggctccttcttcctgtacagcaggctgaccgtggacaaatcccggtggcaagagggaaacgtgttcagctgctccgtgatgcacgaggctctccacaaccactacacccagaagagcctctccctgagcctcggctagtaa

SEQ ID NO: 1579 - DNA, 1326 bp, synthetic construct; identical to SEQ ID NO: 1578
  misc_feature 1..1326: note = 21H6-H4L2 heavy chain DNA sequence
  source 1..1326: mol_type = other DNA

SEQ ID NO: 1580 - DNA, 1326 bp, synthetic construct; identical to SEQ ID NO: 1578
  misc_feature 1..1326: note = 21H6-H4L3 heavy chain DNA sequence
  source 1..1326: mol_type = other DNA

SEQ ID NO: 1581 - DNA, 1326 bp, synthetic construct; identical to SEQ ID NO: 1578
  misc_feature 1..1326: note = 21H6-H4L4 heavy chain DNA sequence
  source 1..1326: mol_type = other DNA

SEQ ID NO: 1582 - DNA, 1326 bp, synthetic construct
  misc_feature 1..1326: note = 21H6-H5L1 heavy chain DNA sequence
  source 1..1326: mol_type = other DNA
cagatccagttggtccagtccggaagtgagctgaagaagcctggtgccagtgtcaaagtttcctgcaaagcctctggatataccttcaccattttcggtatgaactgggtccgacaagctccggggcaggggctcgaatggatggggtgggtgaatacatacacaggcgaaccaacatacgcacagggatttacaggtcggttcgtcttttccctggacacatctgtttccatggcctatctgcagatctctagcctgaaggctgaagataccgccgtatatttctgtgcacgggggtggttcgcctactgggggcagggcacccttgtgactgtgtctagcgctagcaccaagggccccagcgtgtttcctctcgctccctgcagccggagcacatccgagagcaccgctgctctgggctgtctcgtgaaggactacttccctgaacccgtcaccgtcagctggaatagcggcgccctgacatccggcgtccacacattccccgctgtcctgcagagcagcggcctgtacagcctgagctccgtggtcaccgtgcctagcagcagcctgggaacaaagacctacacctgcaacgtggaccataagccctccaacaccaaggtggacaagcgggtggaatccaagtatggacccccctgtcctccttgccctgctcctgaatttctcggaggcccctccgtcttcctgtttccccccaagcccaaggacaccctgatgatctcccggacacccgaagtcacctgcgtcgtggtggatgtcagccaggaagatcccgaggtgcagttcaactggtacgtggacggagtggaggtgcataacgccaaaaccaagcccagggaagagcagttcaacagcacctatcgggtcgtgtccgtgctcaccgtcctgcatcaggattggctcaacggcaaggagtacaagtgcaaggtgtccaacaagggcctgccctcctccatcgagaagaccatctccaaggctaagggccaacctcgggagccccaagtgtataccctccctcccagccaggaggagatgaccaagaatcaagtgagcctgacctgcctcgtgaagggattttacccctccgacatcgctgtggaatgggaaagcaatggccaacctgagaacaactacaagaccacaccccccgtgctggactccgatggctccttcttcctgtacagcaggctgaccgtggacaaatcccggtggcaagagggaaacgtgttcagctgctccgtgatgcacgaggctctccacaaccactacacccagaagagcctctccctgagcctcggctagtaa

SEQ ID NO: 1583 - DNA, 1326 bp, synthetic construct; identical to SEQ ID NO: 1582
  misc_feature 1..1326: note = 21H6-H5L2 heavy chain DNA sequence
  source 1..1326: mol_type = other DNA

SEQ ID NO: 1584 - DNA, 1326 bp, synthetic construct; identical to SEQ ID NO: 1582
  misc_feature 1..1326: note = 21H6-H5L3 heavy chain DNA sequence
  source 1..1326: mol_type = other DNA

SEQ ID NO: 1585 - DNA, 1326 bp, synthetic construct; identical to SEQ ID NO: 1582
  misc_feature 1..1326: note = 21H6-H5L4 heavy chain DNA sequence
  source 1..1326: mol_type = other DNA

SEQ ID NO: 1586 - DNA, 1326 bp, synthetic construct
  misc_feature 1..1326: note = 21H6-H6L1 heavy chain DNA sequence
  source 1..1326: mol_type = other DNA
cagatccagctggtccagagtggctccgagctgaaaaagcctggagcttctgtgaaagtctcctgcaaagcttctggctacacatttactatctttgggatgaactgggtaaggcaggccccaggccaaggactggagtggatgggctgggttaatacctacacaggcgagcccacgtacgctgacgacttcacagggaggtttgtgttttccctggatacctccgttagcatggcctatttgcagattagttccctgaaggcagaggatactgccgtgtacttttgtgcacgaggatggtttgcctattggggccagggtaccttggtgaccgtctccagcgctagcaccaagggccccagcgtgtttcctctcgctccctgcagccggagcacatccgagagcaccgctgctctgggctgtctcgtgaaggactacttccctgaacccgtcaccgtcagctggaatagcggcgccctgacatccggcgtccacacattccccgctgtcctgcagagcagcggcctgtacagcctgagctccgtggtcaccgtgcctagcagcagcctgggaacaaagacctacacctgcaacgtggaccataagccctccaacaccaaggtggacaagcgggtggaatccaagtatggacccccctgtcctccttgccctgctcctgaatttctcggaggcccctccgtcttcctgtttccccccaagcccaaggacaccctgatgatctcccggacacccgaagtcacctgcgtcgtggtggatgtcagccaggaagatcccgaggtgcagttcaactggtacgtggacggagtggaggtgcataacgccaaaaccaagcccagggaagagcagttcaacagcacctatcgggtcgtgtccgtgctcaccgtcctgcatcaggattggctcaacggcaaggagtacaagtgcaaggtgtccaacaagggcctgccctcctccatcgagaagaccatctccaaggctaagggccaacctcgggagccccaagtgtataccctccctcccagccaggaggagatgaccaagaatcaagtgagcctgacctgcctcgtgaagggattttacccctccgacatcgctgtggaatgggaaagcaatggccaacctgagaacaactacaagaccacaccccccgtgctggactccgatggctccttcttcctgtacagcaggctgaccgtggacaaatcccggtggcaagagggaaacgtgttcagctgctccgtgatgcacgaggctctccacaaccactacacccagaagagcctctccctgagcctcggctagtaa

SEQ ID NO: 1587 - DNA, 1326 bp, synthetic construct; identical to SEQ ID NO: 1586
  misc_feature 1..1326: note = 21H6-H6L2 heavy chain DNA sequence
  source 1..1326: mol_type = other DNA

SEQ ID NO: 1588 - DNA, 1326 bp, synthetic construct; identical to SEQ ID NO: 1586
  misc_feature 1..1326: note = 21H6-H6L3 heavy chain DNA sequence
  source 1..1326: mol_type = other DNA

SEQ ID NO: 1589 - DNA, 1326 bp, synthetic construct; identical to SEQ ID NO: 1586
  misc_feature 1..1326: note = 21H6-H6L4 heavy chain DNA sequence
  source 1..1326: mol_type = other DNA

SEQ ID NO: 1590 - DNA, 660 bp, synthetic construct
  misc_feature 1..660: note = 21H6-H0L0 light chain DNA sequence
  source 1..660: mol_type = other DNA
gatgtcgttatgactcagaccccactcacgctctcagtgaccatcggacagcctgccagcatctcatgtaaaagtagtcgcagcctgttagattctgacggcaagacctatctgaactggctgctgcagcgtcctggccagagcccaaaaaggctgatctatctcgtctcaaagctggattcaggagtccccgatcggtttacgggtagcggatctggcaccgacttcacactgaagatttctcgggttgaagccgaagatttgggcgtctactattgctggcaaggaacacacttccctcagacctttggcggcggcacaaagctggaaattaataggaccgtggccgcccccagcgtgttcatcttccctcccagcgacgagcagctgaagtctggcaccgccagcgtggtgtgcctgctgaacaacttctacccccgcgaggccaaggtgcagtggaaggtggacaacgccctgcagagcggcaacagccaggagagcgtgaccgagcaggactccaaggacagcacctacagcctgagcagcaccctgaccctgagcaaggccgactacgagaagcacaaggtgtacgcctgcgaggtgacccaccagggactgtctagccccgtgaccaagagcttcaaccggggcgagtgctaa

SEQ ID NO: 1591 - DNA, 660 bp, synthetic construct
  misc_feature 1..660: note = 21H6-H1L1 light chain DNA sequence
  source 1..660: mol_type = other DNA
gatatagtgatgacacagacccccctgtctctctcagttacccccggacaacccgcctctatcagttgcaagagtagtcgctctctgctcgattccgacggaaagacttatctgaattggtatttacaaaaacctgggcagagtccccagcgccttatatatctcgtgtccaaactcgatagcggcgtgcctgaccggttcagcggttcaggctccgggaccgactttacactgaagattagtagggtcgaggcagaagacgtcggtgtttattactgttggcagggcacccatttccctcagacgtttggcggaggtaccaaggtagagataaagaggaccgtggccgcccccagcgtgttcatcttccctcccagcgacgagcagctgaagtctggcaccgccagcgtggtgtgcctgctgaacaacttctacccccgcgaggccaaggtgcagtggaaggtggacaacgccctgcagagcggcaacagccaggagagcgtgaccgagcaggactccaaggacagcacctacagcctgagcagcaccctgaccctgagcaaggccgactacgagaagcacaaggtgtacgcctgcgaggtgacccaccagggactgtctagccccgtgaccaagagcttcaaccggggcgagtgctaa

SEQ ID NO: 1592 - DNA, 660 bp, synthetic construct
  misc_feature 1..660: note = 21H6-H1L2 light chain DNA sequence
  source 1..660: mol_type = other DNA
gatgtggtgatgactcagactcctctgagcctgtccgtgaccccaggacaacctgcttccatttcctgtaaatcctcccgttccttattggatagcgacgggaagacatacctgaactggctgctgcagaaacccgggcagtccccgcagagattaatatatctggtatctaagctggatagtggtgtaccagatcggtttagcggatccggctcaggtaccgacttcacgctcaagatctccagggtggaggctgaggatgtaggagtatactactgttggcaggggacccattttcctcaaacatttggggggggaacaaaggtagagatcaagaggaccgtggccgcccccagcgtgttcatcttccctcccagcgacgagcagctgaagtctggcaccgccagcgtggtgtgcctgctgaacaacttctacccccgcgaggccaaggtgcagtggaaggtggacaacgccctgcagagcggcaacagccaggagagcgtgaccgagcaggactccaaggacagcacctacagcctgagcagcaccctgaccctgagcaaggccgactacgagaagcacaaggtgtacgcctgcgaggtgacccaccagggactgtctagccccgtgaccaagagcttcaaccggggcgagtgctaa

SEQ ID NO: 1593 - DNA, 660 bp, synthetic construct
  misc_feature 1..660: note = 21H6-H1L3 light chain DNA sequence
  source 1..660: mol_type = other DNA
gatgtggtgatgactcagtctccactcagcctgcctgtaaccttagggcaacctgcctccatcagttgtcgctccagtcgttctctgctggattcagacggtaaaacctatctgaattggttccagcagcgtccaggacagtctccacgccgactgatatatctcgtgagtaagttggattcaggcgtgcccgatcgcttcagtggcagcgggtctgggactgactttaccctgaaaatatcccgcgtggaggcggaagatgtcggggtatattactgttggcagggtacacatttcccacagacattcgggggaggcactaaggtggaaattaaaaggaccgtggccgcccccagcgtgttcatcttccctcccagcgacgagcagctgaagtctggcaccgccagcgtggtgtgcctgctgaacaacttctacccccgcgaggccaaggtgcagtggaaggtggacaacgccctgcagagcggcaacagccaggagagcgtgaccgagcaggactccaaggacagcacctacagcctgagcagcaccctgaccctgagcaaggccgactacgagaagcacaaggtgtacgcctgcgaggtgacccaccagggactgtctagccccgtgaccaagagcttcaaccggggcgagtgctaa

SEQ ID NO: 1594 - DNA, 660 bp, synthetic construct
  misc_feature 1..660: note = 21H6-H1L4 light chain DNA sequence
  source 1..660: mol_type = other DNA
gacgtggtgatgacacagagcccgctgtctctcccggtaacgctgggccagccggcgtctattagctgtaagagtagccgaagtctccttgatagcgacggaaaaacctatctgaactggcttcagcaacgccctgggcagtccccccgccgcctgatttatctggtgtccaaactggacagcggcgtgcccgacaggttctccgggagcggtagcggtactgactttacgctcaagatttcccgcgtggaggccgaggatgtcggggtatattactgctggcaggggacgcattttccgcagacctttggcggaggcaccaaagtggagatcaaaaggaccgtggccgcccccagcgtgttcatcttccctcccagcgacgagcagctgaagtctggcaccgccagcgtggtgtgcctgctgaacaacttctacccccgcgaggccaaggtgcagtggaaggtggacaacgccctgcagagcggcaacagccaggagagcgtgaccgagcaggactccaaggacagcacctacagcctgagcagcaccctgaccctgagcaaggccgactacgagaagcacaaggtgtacgcctgcgaggtgacccaccagggactgtctagccccgtgaccaagagcttcaaccggggcgagtgctaa

SEQ ID NO: 1595 - DNA, 660 bp, synthetic construct; identical to SEQ ID NO: 1591
  misc_feature 1..660: note = 21H6-H2L1 light chain DNA sequence
  source 1..660: mol_type = other DNA

SEQ ID NO: 1596 - DNA, 660 bp, synthetic construct; identical to SEQ ID NO: 1592
  misc_feature 1..660: note = 21H6-H2L2 light chain DNA sequence
  source 1..660: mol_type = other DNA

SEQ ID NO: 1597 - DNA, 660 bp, synthetic construct; identical to SEQ ID NO: 1593
  misc_feature 1..660: note = 21H6-H2L3 light chain DNA sequence
  source 1..660: mol_type = other DNA

SEQ ID NO: 1598 - DNA, 660 bp, synthetic construct; identical to SEQ ID NO: 1594
  misc_feature 1..660: note = 21H6-H2L4 light chain DNA sequence
  source 1..660: mol_type = other DNA

SEQ ID NO: 1599 - DNA, 660 bp, synthetic construct; identical to SEQ ID NO: 1591
  misc_feature 1..660: note = 21H6-H3L1 light chain DNA sequence
  source 1..660: mol_type = other DNA

SEQ ID NO: 1600 - DNA, 660 bp, synthetic construct; identical to SEQ ID NO: 1592
  misc_feature 1..660: note = 21H6-H3L2 light chain DNA sequence
  source 1..660: mol_type = other DNA

SEQ ID NO: 1601 - DNA, 660 bp, synthetic construct; identical to SEQ ID NO: 1593
  misc_feature 1..660: note = 21H6-H3L3 light chain DNA sequence
  source 1..660: mol_type = other DNA

SEQ ID NO: 1602 - DNA, 660 bp, synthetic construct; identical to SEQ ID NO: 1594
  misc_feature 1..660: note = 21H6-H3L4 light chain DNA sequence
  source 1..660: mol_type = other DNA

SEQ ID NO: 1603 - DNA, 660 bp, synthetic construct; identical to SEQ ID NO: 1591
  misc_feature 1..660: note = 21H6-H4L1 light chain DNA sequence
  source 1..660: mol_type = other DNA

SEQ ID NO: 1604 - DNA, 660 bp, synthetic construct; identical to SEQ ID NO: 1592
  misc_feature 1..660: note = 21H6-H4L2 light chain DNA sequence
  source 1..660: mol_type = other DNA

SEQ ID NO: 1605 - DNA, 660 bp, synthetic construct; identical to SEQ ID NO: 1593
  misc_feature 1..660: note = 21H6-H4L3 light chain DNA sequence
  source 1..660: mol_type = other DNA

SEQ ID NO: 1606 - DNA, 660 bp, synthetic construct; identical to SEQ ID NO: 1594
  misc_feature 1..660: note = 21H6-H4L4 light chain DNA sequence
  source 1..660: mol_type = other DNA

SEQ ID NO: 1607 - DNA, 660 bp, synthetic construct; identical to SEQ ID NO: 1591
  misc_feature 1..660: note = 21H6-H5L1 light chain DNA sequence
  source 1..660: mol_type = other DNA

SEQ ID NO: 1608 - DNA, 660 bp, synthetic construct; identical to SEQ ID NO: 1592
  misc_feature 1..660: note = 21H6-H5L2 light chain DNA sequence
  source 1..660: mol_type = other DNA

SEQ ID NO: 1609 - DNA, 660 bp, synthetic construct; identical to SEQ ID NO: 1593
  misc_feature 1..660: note = 21H6-H5L3 light chain DNA sequence
  source 1..660: mol_type = other DNA

SEQ ID NO: 1610 - DNA, 660 bp, synthetic construct; identical to SEQ ID NO: 1594
  misc_feature 1..660: note = 21H6-H5L4 light chain DNA sequence
  source 1..660: mol_type = other DNA

SEQ ID NO: 1611 - DNA, 660 bp, synthetic construct; identical to SEQ ID NO: 1591
  misc_feature 1..660: note = 21H6-H6L1 light chain DNA sequence
  source 1..660: mol_type = other DNA

SEQ ID NO: 1612 - DNA, 660 bp, synthetic construct; identical to SEQ ID NO: 1592
  misc_feature 1..660: note = 21H6-H6L2 light chain DNA sequence
  source 1..660: mol_type = other DNA

SEQ ID NO: 1613 - DNA, 660 bp, synthetic construct; identical to SEQ ID NO: 1593
  misc_feature 1..660: note = 21H6-H6L3 light chain DNA sequence
  source 1..660: mol_type = other DNA

SEQ ID NO: 1614 - DNA, 660 bp, synthetic construct; identical to SEQ ID NO: 1594
  misc_feature 1..660: note = 21H6-H6L4 light chain DNA sequence
  source 1..660: mol_type = other DNA

SEQ ID NO: 1615 - protein, 329 aa, synthetic construct
  REGION 1..329: note = Exemplary hIgG1(KEM) Fc region
ASTKGPSVFPLAPSSKSTSGGTAALGCLVKDYFPEPVTVSWNSGALTSGVHTFPAVLQSSGLYSLSSVVTVPSSSLGTQTYICNVNHKPSNTKVDKKVEPKSCDKTHTCPPCPAPELLGGPSVFLFPPKPKDTLMISRTPEVTCVVVDVSHEDPEVKFNWYVDGVEVHNAKTKPREEQYNSTYRVVSVLTVLHQDWLNGKEYKCKVSNKALPAPIEKTISKAKGQPREPQVYTLPPSREEMTKNQVSLTCLVKGFYPSDIAVEWESNGQPENNYKTTPPVLDSDGSFFLYSKLTVDKSRWQQGNVFSCSVMHEALHNHYTQKSLSLSPG

SEQ ID NO: 1616 - protein, 329 aa, synthetic construct
  REGION 1..329: note = Exemplary hIgG1(REM) Fc region
ASTKGPSVFPLAPSSKSTSGGTAALGCLVKDYFPEPVTVSWNSGALTSGVHTFPAVLQSSGLYSLSSVVTVPSSSLGTQTYICNVNHKPSNTKVDKRVEPKSCDKTHTCPPCPAPELLGGPSVFLFPPKPKDTLMISRTPEVTCVVVDVSHEDPEVKFNWYVDGVEVHNAKTKPREEQYNSTYRVVSVLTVLHQDWLNGKEYKCKVSNKALPAPIEKTISKAKGQPREPQVYTLPPSREEMTKNQVSLTCLVKGFYPSDIAVEWESNGQPENNYKTTPPVLDSDGSFFLYSKLTVDKSRWQQGNVFSCSVMHEALHNHYTQKSLSLSPG

SEQ ID NO: 1617 - protein, 329 aa, synthetic construct
  REGION 1..329: note = Exemplary hIgG1(LALAPGv2) Fc region
ASTKGPSVFPLAPSSKSTSGGTAALGCLVKDYFPEPVTVSWNSGALTSGVHTFPAVLQSSGLYSLSSVVTVPSSSLGTQTYICNVNHKPSNTKVDKKVEPKSCDKTHTCPPCPAPEAAGGPSVFLFPPKPKDTLMISRTPEVTCVVVDVSHEDPEVKFNWYVDGVEVHNAKTKPREEQYNSTYRVVSVLTVLHQDWLNGKEYKCKVSNKALGAPIEKTISKAKGQPREPQVYTLPPSREEMTKNQVSLTCLVKGFYPSDIAVEWESNGQPENNYKTTPPVLDSDGSFFLYSKLTVDKSRWQQGNVFSCSVMHEALHNHYTQKSLSLSPG

SEQ ID NO: 1618 - protein, 492 aa, Homo sapiens
MEPSSKKLTGRLMLAVGGAVLGSLQFGYNTGVINAPQKVIEEFYNQTWVHRYGESILPTTLTTLWSLSVAIFSVGGMIGSFSVGLFVNRFGRRNSMLMMNLLAFVSAVLMGFSKLGKSFEMLILGRFIIGVYCGLTTGFVPMYVGEVSPTALRGALGTLHQLGIVVGILIAQVFGLDSIMGNKDLWPLLLSIIFIPALLQCIVLPFCPESPRFLLINRNEENRAKSVLKKLRGTADVTHDLQEMKEESRQMMREKKVTILELFRSPAYRQPILIAVVLQLSQQLSGINAVFYYSTSIFEKAGVQQPVYATIGSGIVNTAFTVVSLFVVERAGRRTLHLIGLAGMAGCAILMTIALALLEQLPWMSYLSIVAIFGFVAFFEVGPGPIPWFIVAELFSQGPRPAAIAVAGFSNWTSNFIVGMCFQYVEQLCGPYVFIIFTVLLVLFFIFTYFKVPETKGRTFDEIASGFRQGGASQSDKTPEELFHPLGADSQV

SEQ ID NO: 1619 - protein, 15 aa, synthetic construct
  REGION 1..15: note = Gal3 peptide 014
AYPGQAPPGAYPGAP

SEQ ID NO: 1620 - protein, 15 aa, synthetic construct
  REGION 1..15: note = Gal3 peptide 015
QAPPGAYPGAPGAYP

SEQ ID NO: 1621 - protein, 15 aa, synthetic construct
  REGION 1..15: note = Gal3 peptide 016
GAYPGAPGAYPGAPA

SEQ ID NO: 1622 - protein, 15 aa, synthetic construct
  REGION 1..15: note = Gal3 peptide 017
GAPGAYPGAPAPGVY

SEQ ID NO: 1623 - protein, 15 aa, synthetic construct
  REGION 1..15: note = Gal3 peptide 018
AYPGAPAPGVYPGPP

SEQ ID NO: 1624 - protein, 15 aa, synthetic construct
  REGION 1..15: note = Gal3 peptide 019
APAPGVYPGPPSGPG

SEQ ID NO: 1625 - protein, 15 aa, synthetic construct
  REGION 1..15: note = Gal3 peptide 020
GVYPGPSSGPGAYPS

SEQ ID NO: 1626 - protein, 15 aa, synthetic construct
  REGION 1..15: note = Gal3 peptide 021
GPPSGPGAYPSSGQP

SEQ ID NO: 1627 - protein, 15 aa, synthetic construct
  REGION 1..15: note = Gal3 peptide 022
GPGAYPSSGQPSATG

SEQ ID NO: 1628 - protein, 15 aa, synthetic construct
  REGION 1..15: note = Gal3 peptide 023
YPSSGQPSATGAYPA

SEQ ID NO: 1629 - protein, 15 aa, synthetic construct
  REGION 1..15: note = Gal3 peptide 024
GQPSATGAYPATGPY

SEQ ID NO: 1630 - protein, 15 aa, synthetic construct
  REGION 1..15: note = Gal3 peptide 025
ATGAYPATGPYGAPA

SEQ ID NO: 1631 - protein, 15 aa, synthetic construct
  REGION 1..15: note = Gal3 mutant peptide 20
AYPGQAPAGAYPGAP

SEQ ID NO: 1632 - protein, 15 aa, synthetic construct
  REGION 1..15: note = Gal3 mutant peptide 21
QAPPGAYAGAPGAYP

SEQ ID NO: 1633 - protein, 15 aa, synthetic construct
  REGION 1..15: note = Gal3 mutant peptide 22
GAYPGAPAAYPGAPA

SEQ ID NO: 1634 - protein, 15 aa, synthetic construct
  REGION 1..15: note = Gal3 mutant peptide 23
GAPGAYPAAPAPGVY

SEQ ID NO: 1635 - protein, 15 aa, synthetic construct
  REGION 1..15: note = Gal3 mutant peptide 24
AYPGAPAAGVYPGPP

SEQ ID NO: 1636 - protein, 15 aa, synthetic construct
  REGION 1..15: note = Gal3 mutant peptide 25
APAPGVYAGPPSGPG

SEQ ID NO: 1637 - protein, 15 aa, synthetic construct
  REGION 1..15: note = Gal3 mutant peptide 26
GVYPGPPAGPGAYPS

SEQ ID NO: 1638 - protein, 15 aa, synthetic construct
  REGION 1..15: note = Gal3 mutant peptide 27
GPPSGPGAYPSSGQP

SEQ ID NO: 1639 - protein, 15 aa, synthetic construct
  REGION 1..15: note = Gal3 mutant peptide 28
GPGAYPSAGQPSATG

SEQ ID NO: 1640 - protein, 15 aa, synthetic construct
  REGION 1..15: note = Gal3 mutant peptide 29
YPSSGQPAATGAYPA

SEQ ID NO: 1641 - protein, 15 aa, synthetic construct
  REGION 1..15: note = Gal3 mutant peptide 60
AYPGQAPAAAYPGAP

SEQ ID NO: 1642 - protein, 15 aa, synthetic construct
  REGION 1..15: note = Gal3 mutant peptide 61
QAPPGAYAAAPGAYP

SEQ ID NO: 1643 - protein, 15 aa, synthetic construct
  REGION 1..15: note = Gal3 mutant peptide 62
GAYPGAPAAYPGAPA

SEQ ID NO: 1644 - protein, 15 aa, synthetic construct
  REGION 1..15: note = Gal3 mutant peptide 63
GAPGAYPAAPAPGVY

SEQ ID NO: 1645 - protein, 15 aa, synthetic construct
  REGION 1..15: note = Gal3 mutant peptide 64
AYPGAPAAAVYPGPP

SEQ ID NO: 1646 - protein, 15 aa, synthetic construct
  REGION 1..15: note = Gal3 mutant peptide 65
APAPGVYAAPPSGPG

SEQ ID NO: 1647 - protein, 15 aa, synthetic construct
  REGION 1..15: note = Gal3 mutant peptide 66
GVYPGPPAAPGAYPS

SEQ ID NO: 1648 - protein, 15 aa, synthetic construct
  REGION 1..15: note = Gal3 mutant peptide 67
GPPSGPGAAPSSGQP

SEQ ID NO: 1649 - protein, 15 aa, synthetic construct
  REGION 1..15: note = Gal3 mutant peptide 68
GPGAYPSAAQPSATG

SEQ ID NO: 1650 - protein, 15 aa, synthetic construct
  REGION 1..15: note = Gal3 mutant peptide 69
YPSSGQPAATGAYPA

SEQ ID NO: 1651 - protein, 15 aa, synthetic construct
  REGION 1..15: note = Gal3 mutant peptide 98
AYPGQAAAAAYPGAP

SEQ ID NO: 1652 - protein, 15 aa, synthetic construct
  REGION 1..15: note = Gal3 mutant peptide 99
QAPPGAAAAAPGAYP

SEQ ID NO: 1653 - protein, 15 aa, synthetic construct
  REGION 1..15: note = Gal3 mutant peptide 100
GAYPGAAAAYPGAPA

SEQ ID NO: 1654 - protein, 15 aa, synthetic construct
  REGION 1..15: note = Gal3 mutant peptide 101
GAPGAYAAAPAPGVY

SEQ ID NO: 1655 - protein, 15 aa, synthetic construct
  REGION 1..15: note = Gal3 mutant peptide 102
AYPGAPAAAVYPGPP

SEQ ID NO: 1656 - protein, 15 aa, synthetic construct
  REGION 1..15: note = Gal3 mutant peptide 103
APAPGVAAAPPSGPG

SEQ ID NO: 1657 - protein, 15 aa, synthetic construct
  REGION 1..15: note = Gal3 mutant peptide 104
GVYPGPAAAPGAYPS

SEQ ID NO: 1658 - protein, 15 aa, synthetic construct
  REGION 1..15: note = Gal3 mutant peptide 105
GPPSGPAAAPSSGQP

SEQ ID NO: 1659 - protein, 15 aa, synthetic construct
  REGION 1..15: note = Gal3 mutant peptide 106
GPGAYPAAAQPSATG

SEQ ID NO: 1660 - protein, 15 aa, synthetic construct
  REGION 1..15: note = Gal3 mutant peptide 107
YPSSGQAAATGAYPA

SEQ ID NO: 1661 - DNA, 1425 bp, synthetic construct
  misc_feature 1..1425: note = 4A11-VH3-hIgG4(S228P)-VL1 (TB006) HC NT Sequence
  source 1..1425: mol_type = other DNA
atggaccccaagggcagcctgagctggagaatcctgctgttcctgagcctggccttcgagctgagctacggccaggttcaattggtgcagagcggatctgagttgaaaaaacctggagcctccgtcaaggtttcatgtaaggcttccggttacacatttactgagtacactatacactgggtacgccaagcacccggtcagggtttggaatggatgggttggttttaccccggctctgataacattaactacaatgaaggtttcactgggcgatttgttctttccgcagataagagcgtaagcacagcatatctccagatatgcagcctgaaggcagaagacaccgctgtgtacttttgtgcccgtcacgaagaaggggttataaccactgtcagttatttcgactactggggtcaagggactcttgtaacagtttcatctgctagcaccaagggccccagcgtgtttcctctcgctccctgcagccggagcacatccgagagcaccgctgctctgggctgtctcgtgaaggactacttccctgaacccgtcaccgtcagctggaatagcggcgccctgacatccggcgtccacacattccccgctgtcctgcagagcagcggcctgtacagcctgagctccgtggtcaccgtgcctagcagcagcctgggaacaaagacctacacctgcaacgtggaccataagccctccaacaccaaggtggacaagcgggtggaatccaagtatggacccccctgtcctccttgccctgctcctgaatttctcggaggcccctccgtcttcctgtttccccccaagcccaaggacaccctgatgatctcccggacacccgaagtcacctgcgtcgtggtggatgtcagccaggaagatcccgaggtgcagttcaactggtacgtggacggagtggaggtgcataacgccaaaaccaagcccagggaagagcagttcaacagcacctatcgggtcgtgtccgtgctcaccgtcctgcatcaggattggctcaacggcaaggagtacaagtgcaaggtgtccaacaagggcctgccctcctccatcgagaagaccatctccaaggctaagggccaacctcgggagccccaagtgtataccctccctcccagccaggaggagatgaccaagaatcaagtgagcctgacctgcctcgtgaagggattttacccctccgacatcgctgtggaatgggaaagcaatggccaacctgagaacaactacaagaccacaccccccgtgctggactccgatggctccttcttcctgtacagcaggctgaccgtggacaaatcccggtggcaagagggaaacgtgttcagctgctccgtgatgcacgaggctctccacaaccactacacccagaagagcctctccctgagcctcggctagtaa

SEQ ID NO: 1662 - DNA, 1425 bp, synthetic construct; identical to SEQ ID NO: 1661
  misc_feature 1..1425: note = 13H12-VH3-hIgG4(S228P)-VL1 HC NT Sequence
  source 1..1425: mol_type = other DNA

SEQ ID NO: 1663 - DNA, 1404 bp, synthetic construct
  misc_feature 1..1404: note = 19B5-H1L1-hIgG4(S228P) HC NT Sequence
  source 1..1404: mol_type = other DNA
atggaccccaagggcagcctgagctggagaatcctgctgttcctgagcctggccttcgagctgagctacggccaagtgcaacttgtccaatcaggctccgagctgaagaaacccggagcttcagtaaaggtgtcttgtaaggcttctggctatacattcaccacatatgctatgagttgggtccgacaagcaccaggacagggcctcgaatggatgggctggatcaacacctattctggcgtacctacttacgcagacgatttcactggccgatttgtcttctccctcgaaacatccgtatctactgcctacctccaaatcagcagtctcaaagcagaagataccgcagtatatttttgcgctagaggaccctacgcaatggactactggggccaaggaacactggtaaccgtttcttcagctagcaccaagggccccagcgtgtttcctctcgctccctgcagccggagcacatccgagagcaccgctgctctgggctgtctcgtgaaggactacttccctgaacccgtcaccgtcagctggaatagcggcgccctgacatccggcgtccacacattccccgctgtcctgcagagcagcggcctgtacagcctgagctccgtggtcaccgtgcctagcagcagcctgggaacaaagacctacacctgcaacgtggaccataagccctccaacaccaaggtggacaagcgggtggaatccaagtatggacccccctgtcctccttgccctgctcctgaatttctcggaggcccctccgtcttcctgtttccccccaagcccaaggacaccctgatgatctcccggacacccgaagtcacctgcgtcgtggtggatgtcagccaggaagatcccgaggtgcagttcaactggtacgtggacggagtggaggtgcataacgccaaaaccaagcccagggaagagcagttcaacagcacctatcgggtcgtgtccgtgctcaccgtcctgcatcaggattggctcaacggcaaggagtacaagtgcaaggtgtccaacaagggcctgccctcctccatcgagaagaccatctccaaggctaagggccaacctcgggagccccaagtgtataccctccctcccagccaggaggagatgaccaagaatcaagtgagcctgacctgcctcgtgaagggattttacccctccgacatcgctgtggaatgggaaagcaatggccaacctgagaacaactacaagaccacaccccccgtgctggactccgatggctccttcttcctgtacagcaggctgaccgtggacaaatcccggtggcaagagggaaacgtgttcagctgctccgtgatgcacgaggctctccacaaccactacacccagaagagcctctccctgagcctcggctagtaa

SEQ ID NO: 1664 - DNA, 1407 bp, synthetic construct
  misc_feature 1..1407: note = 14H10.2C9-hIgG4(S228P) HC NT Sequence
  source 1..1407: mol_type = other DNA
atggaccccaagggcagcctgagctggagaatcctgctgttcctgagcctggccttcgagctgagctacggccagatccagttggtacagtctggacctgagctgaagaagcctggagagacagtcaagatctcctgcaaggcttctgggtataccttcacaacctatggaatgggctgggtgaaacaggctccaggaaaggatttaaagtggatgggctggataaacacctactctggagtgccaacatatgctgatgacttcaagggacggtttgccttctctttggaaacctctgccagcactgcctatttgcagatcagcaacctcaaaaatgaagacacggctacatatttctgttcaaccccttatgaatacgacggggcttactggggccaggggactctggtcactgtctctgcagctagcaccaagggccccagcgtgtttcctctcgctccctgcagccggagcacatccgagagcaccgctgctctgggctgtctcgtgaaggactacttccctgaacccgtcaccgtcagctggaatagcggcgccctgacatccggcgtccacacattccccgctgtcctgcagagcagcggcctgtacagcctgagctccgtggtcaccgtgcctagcagcagcctgggaacaaagacctacacctgcaacgtggaccataagccctccaacaccaaggtggacaagcgggtggaatccaagtatggacccccctgtcctccttgccctgctcctgaatttctcggaggcccctccgtcttcctgtttccccccaagcccaaggacaccctgatgatctcccggacacccgaagtcacctgcgtcgtggtggatgtcagccaggaagatcccgaggtgcagttcaactggtacgtggacggagtggaggtgcataacgccaaaaccaagcccagggaagagcagttcaacagcacctatcgggtcgtgtccgtgctcaccgtcctgcatcaggattggctcaacggcaaggagtacaagtgcaaggtgtccaacaagggcctgccctcctccatcgagaagaccatctccaaggctaagggccaacctcgggagccccaagtgtataccctccctcccagccaggaggagatgaccaagaatcaagtgagcctgacctgcctcgtgaagggattttacccctccgacatcgctgtggaatgggaaagcaatggccaacctgagaacaactacaagaccacaccccccgtgctggactccgatggctccttcttcctgtacagcaggctgaccgtggacaaatcccggtggcaagagggaaacgtgttcagctgctccgtgatgcacgaggctctccacaaccactacacccagaagagcctctccctgagcctcggctagtaa

SEQ ID NO: 1665 - DNA, 1401 bp, synthetic construct
  misc_feature 1..1401: note = 15G7.2A7-hIgG4(S228P) HC NT Sequence
  source 1..1401: mol_type = other DNA
atggaccccaagggcagcctgagctggagaatcctgctgttcctgagcctggccttcgagctgagctacggcgaggtccagctgcaacaatctggacctgagctggtgaagcctggggcttcagtgaagatatcctgtaaggcttctggatacacgttcactgactactacatgaactgggtgaagcagagccatggaaagagccttgagtggattggagatattaatcctaacaatggtggtactaactacaaccagaagttcaagggcaaggccacattgactgtagacaagtcctccagcacagcctacatggagctccgcagcctgacatctgaggactctgcagtctattactgcacctcaggctacgggtttccttactggggccaggggactctggtcactgtctctgcagctagcaccaagggccccagcgtgtttcctctcgctccctgcagccggagcacatccgagagcaccgctgctctgggctgtctcgtgaaggactacttccctgaacccgtcaccgtcagctggaatagcggcgccctgacatccggcgtccacacattccccgctgtcctgcagagcagcggcctgtacagcctgagctccgtggtcaccgtgcctagcagcagcctgggaacaaagacctacacctgcaacgtggaccataagccctccaacaccaaggtggacaagcgggtggaatccaagtatggacccccctgtcctccttgccctgctcctgaatttctcggaggcccctccgtcttcctgtttccccccaagcccaaggacaccctgatgatctcccggacacccgaagtcacctgcgtcgtggtggatgtcagccaggaagatcccgaggtgcagttcaactggtacgtggacggagtggaggtgcataacgccaaaaccaagcccagggaagagcagttcaacagcacctatcgggtcgtgtccgtgctcaccgtcctgcatcaggattggctcaacggcaaggagtacaagtgcaaggtgtccaacaagggcctgccctcctccatcgagaagaccatctccaaggctaagggccaacctcgggagccccaagtgtataccctccctcccagccaggaggagatgaccaagaatcaagtgagcctgacctgcctcgtgaagggattttacccctccgacatcgctgtggaatgggaaagcaatggccaacctgagaacaactacaagaccacaccccccgtgctggactccgatggctccttcttcctgtacagcaggctgaccgtggacaaatcccggtggcaagagggaaacgtgttcagctgctccgtgatgcacgaggctctccacaaccactacacccagaagagcctctccctgagcctcggctagtaa

SEQ ID NO: 1666 - DNA, 1416 bp, synthetic construct
  misc_feature 1..1416: note = MOPC21-hIgG4(S228P) HC NT Sequence
  source 1..1416: mol_type = other DNA
atggaccccaagggcagcctgagctggagaatcctgctgttcctgagcctggccttcgagctgagctacggcgacgtgcagctggtggagtccggcggcggcctggtgcagcccggcggctccaggaaactgtcctgcgccgcctccggcttcacattctcctccttcggcatgcactgggtgaggcaggcccccgagaaaggcctggagtgggtggcctacatctcctccggctcctccacactgcactacgccgacacagtgaaaggcaggttcacaatctccagggacaaccccaaaaacacactgttcctgcagatgacatccctgaggtccgaggacacaggcatgtactactgcgccaggtggggcaactacccctactacgccatggactactggggccagggcacatccgtgacagtgtcctccgctagcaccaagggccccagcgtgtttcctctcgctccctgcagccggagcacatccgagagcaccgctgctctgggctgtctcgtgaaggactacttccctgaacccgtcaccgtcagctggaatagcggcgccctgacatccggcgtccacacattccccgctgtcctgcagagcagcggcctgtacagcctgagctccgtggtcaccgtgcctagcagcagcctgggaacaaagacctacacctgcaacgtggaccataagccctccaacaccaaggtggacaagcgggtggaatccaagtatggacccccctgtcctccttgccctgctcctgaatttctcggaggcccctccgtcttcctgtttccccccaagcccaaggacaccctgatgatctcccggacacccgaagtcacctgcgtcgtggtggatgtcagccaggaagatcccgaggtgcagttcaactggtacgtggacggagtggaggtgcataacgccaaaaccaagcccagggaagagcagttcaacagcacctatcgggtcgtgtccgtgctcaccgtcctgcatcaggattggctcaacggcaaggagtacaagtgcaaggtgtccaacaagggcctgccctcctccatcgagaagaccatctccaaggctaagggccaacctcgggagccccaagtgtataccctccctcccagccaggaggagatgaccaagaatcaagtgagcctgacctgcctcgtgaagggattttacccctccgacatcgctgtggaatgggaaagcaatggccaacctgagaacaactacaagaccacaccccccgtgctggactccgatggctccttcttcctgtacagcaggctgaccgtggacaaatcccggtggcaagagggaaacgtgttcagctgctccgtgatgcacgaggctctccacaaccactacacccagaagagcctctccctgagcctcggctagtaa

SEQ ID NO: 1667 - DNA, 1422 bp, synthetic construct
  misc_feature 1..1422: note = 846.1H12-hIgG4(S228P) HC NT Sequence
  source 1..1422: mol_type = other DNA
atggaccccaagggcagcctgagctggagaatcctgctgttcctgagcctggccttcgagctgagctacggccagatccagttggtgcagtctggacctgagctgaagaagcctggagagacagtcaagatctcctgcaaggcttctgggtataccttcacaaactttggaatgaactgggtgaagcaggctccaggaaagggtttaaagtggatgggctggataaacacctacactggagagccatcatatgctgatgacttcaagggacggtttgccttctctttggaaacctctgccagcactgcctatttgcagatcaacaacctcaaaaatgaggacattgctacatatttctgtgcaagatgggggggttacgctggggattactatgctatggactactggggtcaaggaacctcagtcaccgtctcctcagctagcaccaagggccccagcgtgtttcctctcgctccctgcagccggagcacatccgagagcaccgctgctctgggctgtctcgtgaaggactacttccctgaacccgtcaccgtcagctggaatagcggcgccctgacatccggcgtccacacattccccgctgtcctgcagagcagcggcctgtacagcctgagctccgtggtcaccgtgcctagcagcagcctgggaacaaagacctacacctgcaacgtggaccataagccctccaacaccaaggtggacaagcgggtggaatccaagtatggacccccctgtcctccttgccctgctcctgaatttctcggaggcccctccgtcttcctgtttccccccaagcccaaggacaccctgatgatctcccggacacccgaagtcacctgcgtcgtggtggatgtcagccaggaagatcccgaggtgcagttcaactggtacgtggacggagtggaggtgcataacgccaaaaccaagcccagggaagagcagttcaacagcacctatcgggtcgtgtccgtgctcaccgtcctgcatcaggattggctcaacggcaaggagtacaagtgcaaggtgtccaacaagggcctgccctcctccatcgagaagaccatctccaaggctaagggccaacctcgggagccccaagtgtataccctccctcccagccaggaggagatgaccaagaatcaagtgagcctgacctgcctcgtgaagggattttacccctccgacatcgctgtggaatgggaaagcaatggccaacctgagaacaactacaagaccacaccccccgtgctggactccgatggctccttcttcctgtacagcaggctgaccgtggacaaatcccggtggcaagagggaaacgtgttcagctgctccgtgatgcacgaggctctccacaaccactacacccagaagagcctctccctgagcctcggctagtaa

SEQ ID NO: 1668 - DNA, 1422 bp, synthetic construct
  misc_feature 1..1422: note = 846.2H3-hIgG4(S228P)HC NT Sequence
  source 1..1422: mol_type = other DNA
atggaccccaagggcagcctgagctggagaatcctgctgttcctgagcctggccttcgagctgagctacggccagatccagttggtgcagtctggacctgagctgaagaagcctggagagacagtcaagatctcctgcaaggcttctgggtataccttcacaaactatggaatgaactgggtgaagcaggctccaggaaagggtttaaagtggatgggctggataaacacctacactggagagccatcatatgctgatgacttcaagggacggtttgccttctctttggaaacctctgccagcactgcctatttgcagatcaacaacctcaaaaatgaggacatggctacatatttctgtgcaagatgggggggttacgatggggattactatgctatggactactggggtcaaggaacctcagtcaccgtctcctcagctagcaccaagggccccagcgtgtttcctctcgctccctgcagccggagcacatccgagagcaccgctgctctgggctgtctcgtgaaggactacttccctgaacccgtcaccgtcagctggaatagcggcgccctgacatccggcgtccacacattccccgctgtcctgcagagcagcggcctgtacagcctgagctccgtggtcaccgtgcctagcagcagcctgggaacaaagacctacacctgcaacgtggaccataagccctccaacaccaaggtggacaagcgggtggaatccaagtatggacccccctgtcctccttgccctgctcctgaatttctcggaggcccctccgtcttcctgtttccccccaagcccaaggacaccctgatgatctcccggacacccgaagtcacctgcgtcgtggtggatgtcagccaggaagatcccgaggtgcagttcaactggtacgtggacggagtggaggtgcataacgccaaaaccaagcccagggaagagcagttcaacagcacctatcgggtcgtgtccgtgctcaccgtcctgcatcaggattggctcaacggcaaggagtacaagtgcaaggtgtccaacaagggcctgccctcctccatcgagaagaccatctccaaggctaagggccaacctcgggagccccaagtgtataccctccctcccagccaggaggagatgaccaagaatcaagtgagcctgacctgcctcgtgaagggattttacccctccgacatcgctgtggaatgggaaagcaatggccaacctgagaacaactacaagaccacaccccccgtgctggactccgatggctccttcttcctgtacagcaggctgaccgtggacaaatcccggtggcaagagggaaacgtgttcagctgctccgtgatgcacgaggctctccacaaccactacacccagaagagcctctccctgagcctcggctagtaa

SEQ ID NO: 1669 - DNA, 1422 bp, synthetic construct; identical to SEQ ID NO: 1668
  misc_feature 1..1422: note = 846.1F5-hIgG4(S228P)HC NT Sequence
  source 1..1422: mol_type = other DNA

SEQ ID NO: 1670 - DNA, 1422 bp, synthetic construct
  misc_feature 1..1422: note = 846T.16B5-hIgG4(S228P) HC NT Sequence
  source 1..1422: mol_type = other DNA
atggaccccaagggcagcctgagctggagaatcctgctgttcctgagcctggccttcgagctgagctacggccagatccagttggtgcagtctggacctgagctgaagaagcctggagagacagtcaagatctcctgcaaggcttctgggtataccttcacaaactatggaatgaactgggtgaagcaggctccaggaaagggtttaaagtggatgggctggataaacacctacactggagagccagcatatgctgatgacttcaagggacggtttgccttctctttggaaacctctgccagcactgcctatttgcagatcaacaacctcaaaaatgaggacatggctacatatttctgtgcaagatgggggggttacgatggggattactatgctatggactactggggtcaaggaacctcagtcaccgtctcctcagctagcaccaagggccccagcgtgtttcctctcgctccctgcagccggagcacatccgagagcaccgctgctctgggctgtctcgtgaaggactacttccctgaacccgtcaccgtcagctggaatagcggcgccctgacatccggcgtccacacattccccgctgtcctgcagagcagcggcctgtacagcctgagctccgtggtcaccgtgcctagcagcagcctgggaacaaagacctacacctgcaacgtggaccataagccctccaacaccaaggtggacaagcgggtggaatccaagtatggacccccctgtcctccttgccctgctcctgaatttctcggaggcccctccgtcttcctgtttccccccaagcccaaggacaccctgatgatctcccggacacccgaagtcacctgcgtcgtggtggatgtcagccaggaagatcccgaggtgcagttcaactggtacgtggacggagtggaggtgcataacgccaaaaccaagcccagggaagagcagttcaacagcacctatcgggtcgtgtccgtgctcaccgtcctgcatcaggattggctcaacggcaaggagtacaagtgcaaggtgtccaacaagggcctgccctcctccatcgagaagaccatctccaaggctaagggccaacctcgggagccccaagtgtataccctccctcccagccaggaggagatgaccaagaatcaagtgagcctgacctgcctcgtgaagggattttacccctccgacatcgctgtggaatgggaaagcaatggccaacctgagaacaactacaagaccacaccccccgtgctggactccgatggctccttcttcctgtacagcaggctgaccgtggacaaatcccggtggcaagagggaaacgtgttcagctgctccgtgatgcacgaggctctccacaaccactacacccagaagagcctctccctgagcctcggctagtaa

SEQ ID NO: 1671 - DNA, 1401 bp, synthetic construct
  misc_feature 1..1401: note = 20D11.2C6-hIgG4(S228P) HC NT Sequence
  source 1..1401: mol_type = other DNA
atggaccccaagggcagcctgagctggagaatcctgctgttcctgagcctggccttcgagctgagctacggcgaggtccagctgcaacaatctggacctgaactggtgaagcctggggcttcagtgaagatatcctgtaaggcttctggatacacgttcactgacttctacataaactgggtgaagcagagccatggaaagagccttgagtggattggagatattaatcctaagaatggtggtattaactacaacccgaagttcaagatcaaggccacattgactgtagacaagtcctccagcacatcctacatggacctccgcggcctgacatctgaggactctgcagtctattactgcacctcaggctacggatttccttactggggccaagggactctggtcactgtctctgcagctagcaccaagggccccagcgtgtttcctctcgctccctgcagccggagcacatccgagagcaccgctgctctgggctgtctcgtgaaggactacttccctgaacccgtcaccgtcagctggaatagcggcgccctgacatccggcgtccacacattccccgctgtcctgcagagcagcggcctgtacagcctgagctccgtggtcaccgtgcctagcagcagcctgggaacaaagacctacacctgcaacgtggaccataagccctccaacaccaaggtggacaagcgggtggaatccaagtatggacccccctgtcctccttgccctgctcctgaatttctcggaggcccctccgtcttcctgtttccccccaagcccaaggacaccctgatgatctcccggacacccgaagtcacctgcgtcgtggtggatgtcagccaggaagatcccgaggtgcagttcaactggtacgtggacggagtggaggtgcataacgccaaaaccaagcccagggaagagcagttcaacagcacctatcgggtcgtgtccgtgctcaccgtcctgcatcaggattggctcaacggcaaggagtacaagtgcaaggtgtccaacaagggcctgccctcctccatcgagaagaccatctccaaggctaagggccaacctcgggagccccaagtgtataccctccctcccagccaggaggagatgaccaagaatcaagtgagcctgacctgcctcgtgaagggattttacccctccgacatcgctgtggaatgggaaagcaatggccaacctgagaacaactacaagaccacaccccccgtgctggactccgatggctccttcttcctgtacagcaggctgaccgtggacaaatcccggtggcaagagggaaacgtgttcagctgctccgtgatgcacgaggctctccacaaccactacacccagaagagcctctccctgagcctcggctagtaa

SEQ ID NO: 1672 - DNA, 1404 bp, synthetic construct
  misc_feature 1..1404: note = 15G7.2A7-hIgG4(S228P) HC NT Sequence
  source 1..1404: mol_type = other DNA
atggaccccaagggcagcctgagctggagaatcctgctgttcctgagcctggccttcgagctgagctacggccaggtgcagctggtgcagtccggctccgagctgaaaaaacccggcgcctccgtgaaagtgtcctgcaaagcctccggctacacattcacaaactacggcatgaactgggtgaggcaggcccccggccagggcctgaaatggatgggctggatcaacacaaacacaggcgagcccacatacgtggaggagttcacaggcaggttcgtgttctccctggagacatccgtgtccacagcctacctgcagatctcctccctgaaagccgaggacacagccgtgtacttctgcgccccctacgacaacttcttcgcctactggggccagggcacaacagtgacagtgtcctccgctagcaccaagggccccagcgtgtttcctctcgctccctgcagccggagcacatccgagagcaccgctgctctgggctgtctcgtgaaggactacttccctgaacccgtcaccgtcagctggaatagcggcgccctgacatccggcgtccacacattccccgctgtcctgcagagcagcggcctgtacagcctgagctccgtggtcaccgtgcctagcagcagcctgggaacaaagacctacacctgcaacgtggaccataagccctccaacaccaaggtggacaagcgggtggaatccaagtatggacccccctgtcctccttgccctgctcctgaatttctcggaggcccctccgtcttcctgtttccccccaagcccaaggacaccctgatgatctcccggacacccgaagtcacctgcgtcgtggtggatgtcagccaggaagatcccgaggtgcagttcaactggtacgtggacggagtggaggtgcataacgccaaaaccaagcccagggaagagcagttcaacagcacctatcgggtcgtgtccgtgctcaccgtcctgcatcaggattggctcaacggcaaggagtacaagtgcaaggtgtccaacaagggcctgccctcctccatcgagaagaccatctccaaggctaagggccaacctcgggagccccaagtgtataccctccctcccagccaggaggagatgaccaagaatcaagtgagcctgacctgcctcgtgaagggattttacccctccgacatcgctgtggaatgggaaagcaatggccaacctgagaacaactacaagaccacaccccccgtgctggactccgatggctccttcttcctgtacagcaggctgaccgtggacaaatcccggtggcaagagggaaacgtgttcagctgctccgtgatgcacgaggctctccacaaccactacacccagaagagcctctccctgagcctcggctagtaa

SEQ ID NO: 1673 - DNA, 1413 bp, synthetic construct
  misc_feature 1..1413: note = IMT001-4-HCLC (TB001) HC NT Sequence
  source 1..1413: mol_type = other DNA
atggaccccaagggcagcctgagctggagaatcctgctgttcctgagcctggccttcgagctgagctacggccagatccagttggtgcagtctggacctgagctgaagaagcctggagagacagtcaagatctcctgcaaggcttctgggtataccttcacaaactatggaatgaactgggtgaagcaggctccaggaaagggtttaaagtggatgggctggataaacacctacactggagagccaacatatgttgatgacttcaagggacggtttgccttctctttggaaacctctgccagcactgcctatttgcggatcaacaacctcaaaaatgaggacacggctacatatttctgtgcaaagtttggtaactacgtgggagctatggactactggggtcaaggaacctcagtcaccgtctcctcagctagcaccaagggccccagcgtgtttcctctcgctccctgcagccggagcacatccgagagcaccgctgctctgggctgtctcgtgaaggactacttccctgaacccgtcaccgtcagctggaatagcggcgccctgacatccggcgtccacacattccccgctgtcctgcagagcagcggcctgtacagcctgagctccgtggtcaccgtgcctagcagcagcctgggaacaaagacctacacctgcaacgtggaccataagccctccaacaccaaggtggacaagcgggtggaatccaagtatggacccccctgtcctccttgccctgctcctgaatttctcggaggcccctccgtcttcctgtttccccccaagcccaaggacaccctgatgatctcccggacacccgaagtcacctgcgtcgtggtggatgtcagccaggaagatcccgaggtgcagttcaactggtacgtggacggagtggaggtgcataacgccaaaaccaagcccagggaagagcagttcaacagcacctatcgggtcgtgtccgtgctcaccgtcctgcatcaggattggctcaacggcaaggagtacaagtgcaaggtgtccaacaagggcctgccctcctccatcgagaagaccatctccaaggctaagggccaacctcgggagccccaagtgtataccctccctcccagccaggaggagatgaccaagaatcaagtgagcctgacctgcctcgtgaagggattttacccctccgacatcgctgtggaatgggaaagcaatggccaacctgagaacaactacaagaccacaccccccgtgctggactccgatggctccttcttcctgtacagcaggctgaccgtggacaaatcccggtggcaagagggaaacgtgttcagctgctccgtgatgcacgaggctctccacaaccactacacccagaagagcctctccctgagcctcggctagtaa

SEQ ID NO: 1674 - DNA, 1398 bp, synthetic construct
  misc_feature 1..1398: note = 846T.14A2-hIgG4(S338P) HC NT Sequence
  source 1..1398: mol_type = other DNA
atggaccccaagggcagcctgagctggagaatcctgctgttcctgagcctggccttcgagctgagctacggccagatccagttggtgcagtctggacctgagctgaagaagcctggagagacagtcaagatctcctgcaaggcttctgggtataccttcacaaactatggaatgaactgggtgaagcaggctccaggaaagggtttaaagtggatgggctggataaacacctacactggagagccaacatatgctggtgacctcaagggacggtttgccttctctttggaaacctctgccagcactgcctatttgcagatcaacaacctcaaaaatgaggacacggctacatatttctgtgtaagatatactatggactactggggtcaaggaacctcagtcaccgtctcctcagctagcaccaagggccccagcgtgtttcctctcgctccctgcagccggagcacatccgagagcaccgctgctctgggctgtctcgtgaaggactacttccctgaacccgtcaccgtcagctggaatagcggcgccctgacatccggcgtccacacattccccgctgtcctgcagagcagcggcctgtacagcctgagctccgtggtcaccgtgcctagcagcagcctgggaacaaagacctacacctgcaacgtggaccataagccctccaacaccaaggtggacaagcgggtggaatccaagtatggacccccctgtcctccttgccctgctcctgaatttctcggaggcccctccgtcttcctgtttccccccaagcccaaggacaccctgatgatctcccggacacccgaagtcacctgcgtcgtggtggatgtcagccaggaagatcccgaggtgcagttcaactggtacgtggacggagtggaggtgcataacgccaaaaccaagcccagggaagagcagttcaacagcacctatcgggtcgtgtccgtgctcaccgtcctgcatcaggattggctcaacggcaaggagtacaagtgcaaggtgtccaacaagggcctgccctcctccatcgagaagaccatctccaaggctaagggccaacctcgggagccccaagtgtataccctccctcccagccaggaggagatgaccaagaatcaagtgagcctgacctgcctcgtgaagggattttacccctccgacatcgctgtggaatgggaaagcaatggccaacctgagaacaactacaagaccacaccccccgtgctggactccgatggctccttcttcctgtacagcaggctgaccgtggacaaatcccggtggcaagagggaaacgtgttcagctgctccgtgatgcacgaggctctccacaaccactacacccagaagagcctctccctgagcctcggctagtaa

SEQ ID NO: 1675 - DNA, 1404 bp, synthetic construct
  misc_feature 1..1404: note = 798-9.20H5.A3-mH1mL0-hIgG4(S228P) HC NT Sequence
  source 1..1404: mol_type = other DNA
atggaccccaagggcagcctgagctggagaatcctgctgttcctgagcctggccttcgagctgagctacggccagatccagttggtacagtctggacctgagctgaagaagcctggagagtcagtcaagatctcctgcaaggcttctggttatgccttcacaacctatggaatgagctgggtgcaacaggctccaggaaagggtttaaagtggatgggctgggtaaacacctactctggagtgccaacatatgctgatgacttcaagggacggtttgccttctctttggaaacctctgccagcactgcctatttgcagatcaacaacctcagaaatgaggacacggctacatatttctgtgcaagagggccctatgctatggactactggggtcaaggaacctcagtcaccgtctcctcagctagcaccaagggccccagcgtgtttcctctcgctccctgcagccggagcacatccgagagcaccgctgctctgggctgtctcgtgaaggactacttccctgaacccgtcaccgtcagctggaatagcggcgccctgacatccggcgtccacacattccccgctgtcctgcagagcagcggcctgtacagcctgagctccgtggtcaccgtgcctagcagcagcctgggaacaaagacctacacctgcaacgtggaccataagccctccaacaccaaggtggacaagcgggtggaatccaagtatggacccccctgtcctccttgccctgctcctgaatttctcggaggcccctccgtcttcctgtttccccccaagcccaaggacaccctgatgatctcccggacacccgaagtcacctgcgtcgtggtggatgtcagccaggaagatcccgaggtgcagttcaactggtacgtggacggagtggaggtgcataacgccaaaaccaagcccagggaagagcagttcaacagcacctatcgggtcgtgtccgtgctcaccgtcctgcatcaggattggctcaacggcaaggagtacaagtgcaaggtgtccaacaagggcctgccctcctccatcgagaagaccatctccaaggctaagggccaacctcgggagccccaagtgtataccctccctcccagccaggaggagatgaccaagaatcaagtgagcctgacctgcctcgtgaagggattttacccctccgacatcgctgtggaatgggaaagcaatggccaacctgagaacaactacaagaccacaccccccgtgctggactccgatggctccttcttcctgtacagcaggctgaccgtggacaaatcccggtggcaagagggaaacgtgttcagctgctccgtgatgcacgaggctctccacaaccactacacccagaagagcctctccctgagcctcggctagtaa

SEQ ID NO: 1676 - DNA, 1398 bp, synthetic construct
  misc_feature 1..1398: note = F847C.21H6-hIgG4(S228P) HC NT Sequence
  source 1..1398: mol_type = other DNA
atggaccccaagggcagcctgagctggagaatcctgctgttcctgagcctggccttcgagctgagctacggccagatccagcttgtacagtctgggcctgaacttaaaaagcccggggaaacagtgaagatctcctgtaaggcttctgggtacacttttacgatctttggaatgaactgggtcaagcaggctcccggaaaaggtctgaagtggatgggctgggtgaatacatacacgggggaacccacctatgctgacgattttaaggggcggttcgctttctctctcgaaaccagcgcgagtacagcatacttacagatcaacaacttgaagaacgaagatacagctacgtatttctgtgctagagggtggttcgcgtattgggggcaaggcactctcgtcaccgtatccgccgctagcaccaagggccccagcgtgtttcctctcgctccctgcagccggagcacatccgagagcaccgctgctctgggctgtctcgtgaaggactacttccctgaacccgtcaccgtcagctggaatagcggcgccctgacatccggcgtccacacattccccgctgtcctgcagagcagcggcctgtacagcctgagctccgtggtcaccgtgcctagcagcagcctgggaacaaagacctacacctgcaacgtggaccataagccctccaacaccaaggtggacaagcgggtggaatccaagtatggacccccctgtcctccttgccctgctcctgaatttctcggaggcccctccgtcttcctgtttccccccaagcccaaggacaccctgatgatctcccggacacccgaagtcacctgcgtcgtggtggatgtcagccaggaagatcccgaggtgcagttcaactggtacgtggacggagtggaggtgcataacgccaaaaccaagcccagggaagagcagttcaacagcacctatcgggtcgtgtccgtgctcaccgtcctgcatcaggattggctcaacggcaaggagtacaagtgcaaggtgtccaacaagggcctgccctcctccatcgagaagaccatctccaaggctaagggccaacctcgggagccccaagtgtataccctccctcccagccaggaggagatgaccaagaatcaagtgagcctgacctgcctcgtgaagggattttacccctccgacatcgctgtggaatgggaaagcaatggccaacctgagaacaactacaagaccacaccccccgtgctggactccgatggctccttcttcctgtacagcaggctgaccgtggacaaatcccggtggcaagagggaaacgtgttcagctgctccgtgatgcacgaggctctccacaaccactacacccagaagagcctctccctgagcctcggctagtaa

SEQ ID NO: 1677 - DNA, 1407 bp, synthetic construct
  misc_feature 1..1407: note = 798-9.19D9.2E5-hIgG4(S228P)-mV2 HC NT Sequence
  source 1..1407: mol_type = other DNA
atggaccccaagggcagcctgagctggagaatcctgctgttcctgagcctggccttcgagctgagctacggccagatccagttggtacagtctggacctgagctgaagaagcctggagagacagtcaagatctcctgcaaggcttctggatataccttcacaacctatggaatgggctgggtgaaacaggctccaggaaagggtttgaagtggatgggctggataaacacctactctggcgtgccaacatatgctgatgacttcaagggacggtttgccttctctttggaaacctctaccagcactgcctatttgcagatcaacaacctcaaaaatgaggacatggctacatatttctgtgcaaccccttatgaatacgacggggcttactggggccaagggactctggtcactgtctctgcagctagcaccaagggccccagcgtgtttcctctcgctccctgcagccggagcacatccgagagcaccgctgctctgggctgtctcgtgaaggactacttccctgaacccgtcaccgtcagctggaatagcggcgccctgacatccggcgtccacacattccccgctgtcctgcagagcagcggcctgtacagcctgagctccgtggtcaccgtgcctagcagcagcctgggaacaaagacctacacctgcaacgtggaccataagccctccaacaccaaggtggacaagcgggtggaatccaagtatggacccccctgtcctccttgccctgctcctgaatttctcggaggcccctccgtcttcctgtttccccccaagcccaaggacaccctgatgatctcccggacacccgaagtcacctgcgtcgtggtggatgtcagccaggaagatcccgaggtgcagttcaactggtacgtggacggagtggaggtgcataacgccaaaaccaagcccagggaagagcagttcaacagcacctatcgggtcgtgtccgtgctcaccgtcctgcatcaggattggctcaacggcaaggagtacaagtgcaaggtgtccaacaagggcctgccctcctccatcgagaagaccatctccaaggctaagggccaacctcgggagccccaagtgtataccctccctcccagccaggaggagatgaccaagaatcaagtgagcctgacctgcctcgtgaagggattttacccctccgacatcgctgtggaatgggaaagcaatggccaacctgagaacaactacaagaccacaccccccgtgctggactccgatggctccttcttcctgtacagcaggctgaccgtggacaaatcccggtggcaagagggaaacgtgttcagctgctccgtgatgcacgaggctctccacaaccactacacccagaagagcctctccctgagcctcggctagtaa

SEQ ID NO: 1678 - protein, 473 aa, synthetic construct
  REGION 1..473: note = 4A11-VH3-hIgG4(S228P)-VL1 (TB006) HC AA Sequence w/SS
MDPKGSLSWRILLFLSLAFELSYGQVQLVQSGSELKKPGASVKVSCKASGYTFTEYTIHWVRQAPGQGLEWMGWFYPGSDNINYNEGFTGRFVLSADKSVSTAYLQICSLKAEDTAVYFCARHEEGVITTVSYFDYWGQGTLVTVSSASTKGPSVFPLAPCSRSTSESTAALGCLVKDYFPEPVTVSWNSGALTSGVHTFPAVLQSSGLYSLSSVVTVPSSSLGTKTYTCNVDHKPSNTKVDKRVESKYGPPCPPCPAPEFLGGPSVFLFPPKPKDTLMISRTPEVTCVVVDVSQEDPEVQFNWYVDGVEVHNAKTKPREEQFNSTYRVVSVLTVLHQDWLNGKEYKCKVSNKGLPSSIEKTISKAKGQPREPQVYTLPPSQEEMTKNQVSLTCLVKGFYPSDIAVEWESNGQPENNYKTTPPVLDSDGSFFLYSRLTVDKSRWQEGNVFSCSVMHEALHNHYTQKSLSLSLG

SEQ ID NO: 1679 - protein, 466 aa, synthetic construct
  REGION 1..466: note = 13H12-VH3-hIgG4(S228P)-VL1 HC AA Sequence w/SS
MDPKGSLSWRILLFLSLAFELSYGQVQLVQSGAEVKKPGASVKVSCKASGYSFTNYYMHWVRQAPGQRLEWMGWIYPGSGNTNYNEKFQGRVTITADTSASTAYMELSSLRSEDTAVYYCSTAPGGFDVWGQGTTVTVSSASTKGPSVFPLAPCSRSTSESTAALGCLVKDYFPEPVTVSWNSGALTSGVHTFPAVLQSSGLYSLSSVVTVPSSSLGTKTYTCNVDHKPSNTKVDKRVESKYGPPCPPCPAPEFLGGPSVFLFPPKPKDTLMISRTPEVTCVVVDVSQEDPEVQFNWYVDGVEVHNAKTKPREEQFNSTYRVVSVLTVLHQDWLNGKEYKCKVSNKGLPSSIEKTISKAKGQPREPQVYTLPPSQEEMTKNQVSLTCLVKGFYPSDIAVEWESNGQPENNYKTTPPVLDSDGSFFLYSRLTVDKSRWQEGNVFSCSVMHEALHNHYTQKSLSLSLG

SEQ ID NO: 1680 - protein, 466 aa, synthetic construct
  REGION 1..466: note = 19B5-H1L1-hIgG4(S228P) HC AA Sequence w/SS
MDPKGSLSWRILLFLSLAFELSYGQVQLVQSGSELKKPGASVKVSCKASGYTFTTYAMSWVRQAPGQGLEWMGWINTYSGVPTYADDFTGRFVFSLETSVSTAYLQISSLKAEDTAVYFCARGPYAMDYWGQGTLVTVSSASTKGPSVFPLAPCSRSTSESTAALGCLVKDYFPEPVTVSWNSGALTSGVHTFPAVLQSSGLYSLSSVVTVPSSSLGTKTYTCNVDHKPSNTKVDKRVESKYGPPCPPCPAPEFLGGPSVFLFPPKPKDTLMISRTPEVTCVVVDVSQEDPEVQFNWYVDGVEVHNAKTKPREEQFNSTYRVVSVLTVLHQDWLNGKEYKCKVSNKGLPSSIEKTISKAKGQPREPQVYTLPPSQEEMTKNQVSLTCLVKGFYPSDIAVEWESNGQPENNYKTTPPVLDSDGSFFLYSRLTVDKSRWQEGNVFSCSVMHEALHNHYTQKSLSLSLG

SEQ ID NO: 1681 - protein, 467 aa, synthetic construct
  REGION 1..467: note = 14H10.2C9-hIgG4(S228P) HC AA Sequence w/SS
MDPKGSLSWRILLFLSLAFELSYGQIQLVQSGPELKKPGETVKISCKASGYTFTTYGMGWVKQAPGKDLKWMGWINTYSGVPTYADDFKGRFAFSLETSASTAYLQISNLKNEDTATYFCSTPYEYDGAYWGQGTLVTVSAASTKGPSVFPLAPCSRSTSESTAALGCLVKDYFPEPVTVSWNSGALTSGVHTFPAVLQSSGLYSLSSVVTVPSSSLGTKTYTCNVDHKPSNTKVDKRVESKYGPPCPPCPAPEFLGGPSVFLFPPKPKDTLMISRTPEVTCVVVDVSQEDPEVQFNWYVDGVEVHNAKTKPREEQFNSTYRVVSVLTVLHQDWLNGKEYKCKVSNKGLPSSIEKTISKAKGQPREPQVYTLPPSQEEMTKNQVSLTCLVKGFYPSDIAVEWESNGQPENNYKTTPPVLDSDGSFFLYSRLTVDKSRWQEGNVFSCSVMHEALHNHYTQKSLSLSLG

SEQ ID NO: 1682 - protein, 465 aa, synthetic construct
  REGION 1..465: note = 15G7.2A7-hIgG4(S228P) HC AA Sequence w/SS
MDPKGSLSWRILLFLSLAFELSYGEVQLQQSGPELVKPGASVKISCKASGYTFTDYYMNWVKQSHGKSLEWIGDINPNNGGTNYNQKFKGKATLTVDKSSSTAYMELRSLTSEDSAVYYCTSGYGFPYWGQGTLVTVSAASTKGPSVFPLAPCSRSTSESTAALGCLVKDYFPEPVTVSWNSGALTSGVHTFPAVLQSSGLYSLSSVVTVPSSSLGTKTYTCNVDHKPSNTKVDKRVESKYGPPCPPCPAPEFLGGPSVFLFPPKPKDTLMISRTPEVTCVVVDVSQEDPEVQFNWYVDGVEVHNAKTKPREEQFNSTYRVVSVLTVLHQDWLNGKEYKCKVSNKGLPSSIEKTISKAKGQPREPQVYTLPPSQEEMTKNQVSLTCLVKGFYPSDIAVEWESNGQPENNYKTTPPVLDSDGSFFLYSRLTVDKSRWQEGNVFSCSVMHEALHNHYTQKSLSLSLG

SEQ ID NO: 1683 - protein, 470 aa, synthetic construct
  REGION 1..470: note = MOPC21-hIgG4(S228P) HC AA Sequence w/SS
MDPKGSLSWRILLFLSLAFELSYGDVQLVESGGGLVQPGGSRKLSCAASGFTFSSFGMHWVRQAPEKGLEWVAYISSGSSTLHYADTVKGRFTISRDNPKNTLFLQMTSLRSEDTGMYYCARWGNYPYYAMDYWGQGTSVTVSSASTKGPSVFPLAPCSRSTSESTAALGCLVKDYFPEPVTVSWNSGALTSGVHTFPAVLQSSGLYSLSSVVTVPSSSLGTKTYTCNVDHKPSNTKVDKRVESKYGPPCPPCPAPEFLGGPSVFLFPPKPKDTLMISRTPEVTCVVVDVSQEDPEVQFNWYVDGVEVHNAKTKPREEQFNSTYRVVSVLTVLHQDWLNGKEYKCKVSNKGLPSSIEKTISKAKGQPREPQVYTLPPSQEEMTKNQVSLTCLVKGFYPSDIAVEWESNGQPENNYKTTPPVLDSDGSFFLYSRLTVDKSRWQEGNVFSCSVMHEALHNHYTQKSLSLSLG

SEQ ID NO: 1684 - protein, 472 aa, synthetic construct
  REGION 1..472: note = 846.1H12-hIgG4(S228P) HC AA Sequence w/SS
MDPKGSLSWRILLFLSLAFELSYGQIQLVQSGPELKKPGETVKISCKASGYTFTNFGMNWVKQAPGKGLKWMGWINTYTGEPSYADDFKGRFAFSLETSASTAYLQINNLKNEDIATYFCARWGGYAGDYYAMDYWGQGTSVTVSSASTKGPSVFPLAPCSRSTSESTAALGCLVKDYFPEPVTVSWNSGALTSGVHTFPAVLQSSGLYSLSSVVTVPSSSLGTKTYTCNVDHKPSNTKVDKRVESKYGPPCPPCPAPEFLGGPSVFLFPPKPKDTLMISRTPEVTCVVVDVSQEDPEVQFNWYVDGVEVHNAKTKPREEQFNSTYRVVSVLTVLHQDWLNGKEYKCKVSNKGLPSSIEKTISKAKGQPREPQVYTLPPSQEEMTKNQVSLTCLVKGFYPSDIAVEWESNGQPENNYKTTPPVLDSDGSFFLYSRLTVDKSRWQEGNVFSCSVMHEALHNHYTQKSLSLSLG

SEQ ID NO: 1685 - protein, 472 aa, synthetic construct
  REGION 1..472: note = 846.2H3-hIgG4(S228P)HC AA Sequence w/SS
MDPKGSLSWRILLFLSLAFELSYGQIQLVQSGPELKKPGETVKISCKASGYTFTNYGMNWVKQAPGKGLKWMGWINTYTGEPSYADDFKGRFAFSLETSASTAYLQINNLKNEDMATYFCARWGGYDGDYYAMDYWGQGTSVTVSSASTKGPSVFPLAPCSRSTSESTAALGCLVKDYFPEPVTVSWNSGALTSGVHTFPAVLQSSGLYSLSSVVTVPSSSLGTKTYTCNVDHKPSNTKVDKRVESKYGPPCPPCPAPEFLGGPSVFLFPPKPKDTLMISRTPEVTCVVVDVSQEDPEVQFNWYVDGVEVHNAKTKPREEQFNSTYRVVSVLTVLHQDWLNGKEYKCKVSNKGLPSSIEKTISKAKGQPREPQVYTLPPSQEEMTKNQVSLTCLVKGFYPSDIAVEWESNGQPENNYKTTPPVLDSDGSFFLYSRLTVDKSRWQEGNVFSCSVMHEALHNHYTQKSLSLSLG

SEQ ID NO: 1686 - protein, 472 aa, synthetic construct; identical to SEQ ID NO: 1685
  REGION 1..472: note = 846.1F5-hIgG4(S228P)HC AA Sequence w/SS

SEQ ID NO: 1687 - protein, 472 aa, synthetic construct
  REGION 1..472: note = 846T.16B5-hIgG4(S228P) HC AA Sequence w/SS
MDPKGSLSWRILLFLSLAFELSYGQIQLVQSGPELKKPGETVKISCKASGYTFTNYGMNWVKQAPGKGLKWMGWINTYTGEPAYADDFKGRFAFSLETSASTAYLQINNLKNEDMATYFCARWGGYDGDYYAMDYWGQGTSVTVSSASTKGPSVFPLAPCSRSTSESTAALGCLVKDYFPEPVTVSWNSGALTSGVHTFPAVLQSSGLYSLSSVVTVPSSSLGTKTYTCNVDHKPSNTKVDKRVESKYGPPCPPCPAPEFLGGPSVFLFPPKPKDTLMISRTPEVTCVVVDVSQEDPEVQFNWYVDGVEVHNAKTKPREEQFNSTYRVVSVLTVLHQDWLNGKEYKCKVSNKGLPSSIEKTISKAKGQPREPQVYTLPPSQEEMTKNQVSLTCLVKGFYPSDIAVEWESNGQPENNYKTTPPVLDSDGSFFLYSRLTVDKSRWQEGNVFSCSVMHEALHNHYTQKSLSLSLG

SEQ ID NO: 1688 - protein, 465 aa, synthetic construct
  REGION 1..465: note = 20D11.2C6-hIgG4(S228P) HC AA Sequence w/SS
MDPKGSLSWRILLFLSLAFELSYGEVQLQQSGPELVKPGASVKISCKASGYTFTDFYINWVKQSHGKSLEWIGDINPKNGGINYNPKFKIKATLTVDKSSSTSYMDLRGLTSEDSAVYYCTSGYGFPYWGQGTLVTVSAASTKGPSVFPLAPCSRSTSESTAALGCLVKDYFPEPVTVSWNSGALTSGVHTFPAVLQSSGLYSLSSVVTVPSSSLGTKTYTCNVDHKPSNTKVDKRVESKYGPPCPPCPAPEFLGGPSVFLFPPKPKDTLMISRTPEVTCVVVDVSQEDPEVQFNWYVDGVEVHNAKTKPREEQFNSTYRVVSVLTVLHQDWLNGKEYKCKVSNKGLPSSIEKTISKAKGQPREPQVYTLPPSQEEMTKNQVSLTCLVKGFYPSDIAVEWESNGQPENNYKTTPPVLDSDGSFFLYSRLTVDKSRWQEGNVFSCSVMHEALHNHYTQKSLSLSLG

SEQ ID NO: 1689 - protein, 466 aa, synthetic construct
  REGION 1..466: note = 15G7.2A7-hIgG4(S228P) HC AA Sequence w/SS
MDPKGSLSWRILLFLSLAFELSYGQVQLVQSGSELKKPGASVKVSCKASGYTFTNYGMNWVRQAPGQGLKWMGWINTNTGEPTYVEEFTGRFVFSLETSVSTAYLQISSLKAEDTAVYFCAPYDNFFAYWGQGTTVTVSSASTKGPSVFPLAPCSRSTSESTAALGCLVKDYFPEPVTVSWNSGALTSGVHTFPAVLQSSGLYSLSSVVTVPSSSLGTKTYTCNVDHKPSNTKVDKRVESKYGPPCPPCPAPEFLGGPSVFLFPPKPKDTLMISRTPEVTCVVVDVSQEDPEVQFNWYVDGVEVHNAKTKPREEQFNSTYRVVSVLTVLHQDWLNGKEYKCKVSNKGLPSSIEKTISKAKGQPREPQVYTLPPSQEEMTKNQVSLTCLVKGFYPSDIAVEWESNGQPENNYKTTPPVLDSDGSFFLYSRLTVDKSRWQEGNVFSCSVMHEALHNHYTQKSLSLSLG

SEQ ID NO: 1690 - protein, 469 aa, synthetic construct
  REGION 1..469: note = IMT001-4-HCLC (TB001) HC AA Sequence w/SS
MDPKGSLSWRILLFLSLAFELSYGQIQLVQSGPELKKPGETVKISCKASGYTFTNYGMNWVKQAPGKGLKWMGWINTYTGEPTYVDDFKGRFAFSLETSASTAYLRINNLKNEDTATYFCAKFGNYVGAMDYWGQGTSVTVSSASTKGPSVFPLAPCSRSTSESTAALGCLVKDYFPEPVTVSWNSGALTSGVHTFPAVLQSSGLYSLSSVVTVPSSSLGTKTYTCNVDHKPSNTKVDKRVESKYGPPCPPCPAPEFLGGPSVFLFPPKPKDTLMISRTPEVTCVVVDVSQEDPEVQFNWYVDGVEVHNAKTKPREEQFNSTYRVVSVLTVLHQDWLNGKEYKCKVSNKGLPSSIEKTISKAKGQPREPQVYTLPPSQEEMTKNQVSLTCLVKGFYPSDIAVEWESNGQPENNYKTTPPVLDSDGSFFLYSRLTVDKSRWQEGNVFSCSVMHEALHNHYTQKSLSLSLG

SEQ ID NO: 1691 - protein, 464 aa, synthetic construct
  REGION 1..464: note = 846T.14A2-hIgG4(S338P) HC AA Sequence w/SS
MDPKGSLSWRILLFLSLAFELSYGQIQLVQSGPELKKPGETVKISCKASGYTFTNYGMNWVKQAPGKGLKWMGWINTYTGEPTYAGDLKGRFAFSLETSASTAYLQINNLKNEDTATYFCVRYTMDYWGQGTSVTVSSASTKGPSVFPLAPCSRSTSESTAALGCLVKDYFPEPVTVSWNSGALTSGVHTFPAVLQSSGLYSLSSVVTVPSSSLGTKTYTCNVDHKPSNTKVDKRVESKYGPPCPPCPAPEFLGGPSVFLFPPKPKDTLMISRTPEVTCVVVDVSQEDPEVQFNWYVDGVEVHNAKTKPREEQFNSTYRVVSVLTVLHQDWLNGKEYKCKVSNKGLPSSIEKTISKAKGQPREPQVYTLPPSQEEMTKNQVSLTCLVKGFYPSDIAVEWESNGQPENNYKTTPPVLDSDGSFFLYSRLTVDKSRWQEGNVFSCSVMHEALHNHYTQKSLSLSLG

SEQ ID NO: 1692 - protein, 466 aa, synthetic construct
  REGION 1..466: note = 798-9.20H5.A3-mH1mL0-hIgG4(S228P) HC AA Sequence w/SS
MDPKGSLSWRILLFLSLAFELSYGQIQLVQSGPELKKPGESVKISCKASGYAFTTYGMSWVQQAPGKGLKWMGWVNTYSGVPTYADDFKGRFAFSLETSASTAYLQINNLRNEDTATYFCARGPYAMDYWGQGTSVTVSSASTKGPSVFPLAPCSRSTSESTAALGCLVKDYFPEPVTVSWNSGALTSGVHTFPAVLQSSGLYSLSSVVTVPSSSLGTKTYTCNVDHKPSNTKVDKRVESKYGPPCPPCPAPEFLGGPSVFLFPPKPKDTLMISRTPEVTCVVVDVSQEDPEVQFNWYVDGVEVHNAKTKPREEQFNSTYRVVSVLTVLHQDWLNGKEYKCKVSNKGLPSSIEKTISKAKGQPREPQVYTLPPSQEEMTKNQVSLTCLVKGFYPSDIAVEWESNGQPENNYKTTPPVLDSDGSFFLYSRLTVDKSRWQEGNVFSCSVMHEALHNHYTQKSLSLSLG

SEQ ID NO: 1693 - protein, 464 aa, synthetic construct
  REGION 1..464: note = F847C.21H6-hIgG4(S228P) HC AA Sequence w/SS
MDPKGSLSWRILLFLSLAFELSYGQIQLVQSGPELKKPGETVKISCKASGYTFTIFGMNWVKQAPGKGLKWMGWVNTYTGEPTYADDFKGRFAFSLETSASTAYLQINNLKNEDTATYFCARGWFAYWGQGTLVTVSAASTKGPSVFPLAPCSRSTSESTAALGCLVKDYFPEPVTVSWNSGALTSGVHTFPAVLQSSGLYSLSSVVTVPSSSLGTKTYTCNVDHKPSNTKVDKRVESKYGPPCPPCPAPEFLGGPSVFLFPPKPKDTLMISRTPEVTCVVVDVSQEDPEVQFNWYVDGVEVHNAKTKPREEQFNSTYRVVSVLTVLHQDWLNGKEYKCKVSNKGLPSSIEKTISKAKGQPREPQVYTLPPSQEEMTKNQVSLTCLVKGFYPSDIAVEWESNGQPENNYKTTPPVLDSDGSFFLYSRLTVDKSRWQEGNVFSCSVMHEALHNHYTQKSLSLSLG

SEQ ID NO: 1694 - protein, 467 aa, synthetic construct
  REGION 1..467: note = 798-9.19D9.2E5-hIgG4(S228P)-mV2 HC AA Sequence w/SS
MDPKGSLSWRILLFLSLAFELSYGQIQLVQSGPELKKPGETVKISCKASGYTFTTYGMGWVKQAPGKGLKWMGWINTYSGVPTYADDFKGRFAFSLETSTSTAYLQINNLKNEDMATYFCATPYEYDGAYWGQGTLVTVSAASTKGPSVFPLAPCSRSTSESTAALGCLVKDYFPEPVTVSWNSGALTSGVHTFPAVLQSSGLYSLSSVVTVPSSSLGTKTYTCNVDHKPSNTKVDKRVESKYGPPCPPCPAPEFLGGPSVFLFPPKPKDTLMISRTPEVTCVVVDVSQEDPEVQFNWYVDGVEVHNAKTKPREEQFNSTYRVVSVLTVLHQDWLNGKEYKCKVSNKGLPSSIEKTISKAKGQPREPQVYTLPPSQEEMTKNQVSLTCLVKGFYPSDIAVEWESNGQPENNYKTTPPVLDSDGSFFLYSRLTVDKSRWQEGNVFSCSVMHEALHNHYTQKSLSLSLG

SEQ ID NO: 1695 - protein, 449 aa, synthetic construct
  REGION 1..449: note = 4A11-VH3-hIgG4(S228P)-VL1 (TB006) HC AA Sequence w/o SS
QVQLVQSGSELKKPGASVKVSCKASGYTFTEYTIHWVRQAPGQGLEWMGWFYPGSDNINYNEGFTGRFVLSADKSVSTAYLQICSLKAEDTAVYFCARHEEGVITTVSYFDYWGQGTLVTVSSASTKGPSVFPLAPCSRSTSESTAALGCLVKDYFPEPVTVSWNSGALTSGVHTFPAVLQSSGLYSLSSVVTVPSSSLGTKTYTCNVDHKPSNTKVDKRVESKYGPPCPPCPAPEFLGGPSVFLFPPKPKDTLMISRTPEVTCVVVDVSQEDPEVQFNWYVDGVEVHNAKTKPREEQFNSTYRVVSVLTVLHQDWLNGKEYKCKVSNKGLPSSIEKTISKAKGQPREPQVYTLPPSQEEMTKNQVSLTCLVKGFYPSDIAVEWESNGQPENNYKTTPPVLDSDGSFFLYSRLTVDKSRWQEGNVFSCSVMHEALHNHYTQKSLSLSLG

SEQ ID NO: 1696 - protein, 442 aa, synthetic construct; identical to SEQ ID NO: 449
  REGION 1..442: note = 13H12-VH3-hIgG4(S228P)-VL1 HC AA Sequence w/o SS

SEQ ID NO: 1697 - protein, 442 aa, synthetic construct
  REGION 1..442: note = 19B5-H1L1-hIgG4(S228P) HC AA Sequence w/o SS
QVQLVQSGSELKKPGASVKVSCKASGYTFTTYAMSWVRQAPGQGLEWMGWINTYSGVPTYADDFTGRFVFSLETSVSTAYLQISSLKAEDTAVYFCARGPYAMDYWGQGTLVTVSSASTKGPSVFPLAPCSRSTSESTAALGCLVKDYFPEPVTVSWNSGALTSGVHTFPAVLQSSGLYSLSSVVTVPSSSLGTKTYTCNVDHKPSNTKVDKRVESKYGPPCPPCPAPEFLGGPSVFLFPPKPKDTLMISRTPEVTCVVVDVSQEDPEVQFNWYVDGVEVHNAKTKPREEQFNSTYRVVSVLTVLHQDWLNGKEYKCKVSNKGLPSSIEKTISKAKGQPREPQVYTLPPSQEEMTKNQVSLTCLVKGFYPSDIAVEWESNGQPENNYKTTPPVLDSDGSFFLYSRLTVDKSRWQEGNVFSCSVMHEALHNHYTQKSLSLSLG

SEQ ID NO: 1698 - protein, 443 aa, synthetic construct
  REGION 1..443: note = 14H10.2C9-hIgG4(S228P) HC AA Sequence w/o SS
QIQLVQSGPELKKPGETVKISCKASGYTFTTYGMGWVKQAPGKDLKWMGWINTYSGVPTYADDFKGRFAFSLETSASTAYLQISNLKNEDTATYFCSTPYEYDGAYWGQGTLVTVSAASTKGPSVFPLAPCSRSTSESTAALGCLVKDYFPEPVTVSWNSGALTSGVHTFPAVLQSSGLYSLSSVVTVPSSSLGTKTYTCNVDHKPSNTKVDKRVESKYGPPCPPCPAPEFLGGPSVFLFPPKPKDTLMISRTPEVTCVVVDVSQEDPEVQFNWYVDGVEVHNAKTKPREEQFNSTYRVVSVLTVLHQDWLNGKEYKCKVSNKGLPSSIEKTISKAKGQPREPQVYTLPPSQEEMTKNQVSLTCLVKGFYPSDIAVEWESNGQPENNYKTTPPVLDSDGSFFLYSRLTVDKSRWQEGNVFSCSVMHEALHNHYTQKSLSLSLG

SEQ ID NO: 1699 - protein, 441 aa, synthetic construct; identical to SEQ ID NO: 471
  REGION 1..441: note = 15G7.2A7-hIgG4(S228P) HC AA Sequence w/o SS

SEQ ID NO: 1700 - protein, 446 aa, synthetic construct
  REGION 1..446: note = MOPC21-hIgG4(S228P) HC AA Sequence w/o SS
DVQLVESGGGLVQPGGSRKLSCAASGFTFSSFGMHWVRQAPEKGLEWVAYISSGSSTLHYADTVKGRFTISRDNPKNTLFLQMTSLRSEDTGMYYCARWGNYPYYAMDYWGQGTSVTVSSASTKGPSVFPLAPCSRSTSESTAALGCLVKDYFPEPVTVSWNSGALTSGVHTFPAVLQSSGLYSLSSVVTVPSSSLGTKTYTCNVDHKPSNTKVDKRVESKYGPPCPPCPAPEFLGGPSVFLFPPKPKDTLMISRTPEVTCVVVDVSQEDPEVQFNWYVDGVEVHNAKTKPREEQFNSTYRVVSVLTVLHQDWLNGKEYKCKVSNKGLPSSIEKTISKAKGQPREPQVYTLPPSQEEMTKNQVSLTCLVKGFYPSDIAVEWESNGQPENNYKTTPPVLDSDGSFFLYSRLTVDKSRWQEGNVFSCSVMHEALHNHYTQKSLSLSLG

SEQ ID NO: 1701 - protein, 448 aa, synthetic construct; identical to SEQ ID NO: 477
  REGION 1..448: note = 846.1H12-hIgG4(S228P) HC AA Sequence w/o SS

SEQ ID NO: 1702 - protein, 448 aa, synthetic construct; identical to SEQ ID NO: 476
  REGION 1..448: note = 846.2H3-hIgG4(S228P)HC AA Sequence w/o SS

SEQ ID NO: 1703 - protein, 448 aa, synthetic construct; identical to SEQ ID NO: 476
  REGION 1..448: note = 846.1F5-hIgG4(S228P)HC AA Sequence w/o SS

SEQ ID NO: 1704 - protein, 448 aa, synthetic construct; identical to SEQ ID NO: 482
  REGION 1..448: note = 846T.16B5-hIgG4(S228P) HC AA Sequence w/o SS

SEQ ID NO: 1705 - protein, 441 aa, synthetic construct
  REGION 1..441: note = 20D11.2C6-hIgG4(S228P) HC AA Sequence w/o SS
EVQLQQSGPELVKPGASVKISCKASGYTFTDFYINWVKQSHGKSLEWIGDINPKNGGINYNPKFKIKATLTVDKSSSTSYMDLRGLTSEDSAVYYCTSGYGFPYWGQGTLVTVSAASTKGPSVFPLAPCSRSTSESTAALGCLVKDYFPEPVTVSWNSGALTSGVHTFPAVLQSSGLYSLSSVVTVPSSSLGTKTYTCNVDHKPSNTKVDKRVESKYGPPCPPCPAPEFLGGPSVFLFPPKPKDTLMISRTPEVTCVVVDVSQEDPEVQFNWYVDGVEVHNAKTKPREEQFNSTYRVVSVLTVLHQDWLNGKEYKCKVSNKGLPSSIEKTISKAKGQPREPQVYTLPPSQEEMTKNQVSLTCLVKGFYPSDIAVEWESNGQPENNYKTTPPVLDSDGSFFLYSRLTVDKSRWQEGNVFSCSVMHEALHNHYTQKSLSLSLG

SEQ ID NO: 1706 - protein, 442 aa, synthetic construct; identical to SEQ ID NO: 448
  REGION 1..442: note = 15G7.2A7-hIgG4(S228P) HC AA Sequence w/o SS

SEQ ID NO: 1707 - protein, 445 aa, synthetic construct; identical to SEQ ID NO: 486
  REGION 1..445: note = IMT001-4-HCLC (TB001) HC AA Sequence w/o SS

SEQ ID NO: 1708 - protein, 440 aa, synthetic construct; identical to SEQ ID NO: 480
  REGION 1..440: note = 846T.14A2-hIgG4(S338P) HC AA Sequence w/o SS

SEQ ID NO: 1709 - protein, 442 aa, synthetic construct; identical to SEQ ID NO: 1156
  REGION 1..442: note = 798-9.20H5.A3-mH1mL0-hIgG4(S228P) HC AA Sequence w/o SS

SEQ ID NO: 1710 - protein, 440 aa, synthetic construct; identical to SEQ ID NO: 1411
  REGION 1..440: note = F847C.21H6-hIgG4(S228P) HC AA Sequence w/o SS

SEQ ID NO: 1711 - protein, 443 aa, synthetic construct; identical to SEQ ID NO: 472
  REGION 1..443: note = 798-9.19D9.2E5-hIgG4(S228P)-mV2 HC AA Sequence w/o SS

SEQ ID NO: 1712 - DNA, 720 bp, synthetic construct
  misc_feature 1..720: note = 4A11-VH3-hIgG4(S228P)-VL1 (TB006) LC NT Sequence
  source 1..720: mol_type = other DNA
atggaaaccgacaccctgctgctctgggtgctgctgctctgggtgcccggctccaccggagatgtggtcatgactcaaagccccctgtccctgcccgtgacacttggacaacctgcaagtatttcttgccgatcttcccagagtttgtttcatagcgatgggaagacatacctcaactggcttcaacagagaccaggacaaagtccaagacgtttgatttatcttgtttctaaacgtgattccggtgttcctgacaggttcagcggctctggaagcggcactgattttactcttaaaatatcccgtgtagaggcagaggatgtgggtgtttactactgctggcagggtactcattttcctcttacattcgggggtggaacaaaagtagagattaagcggaccgtggccgcccccagcgtgttcatcttccctcccagcgacgagcagctgaagtctggcaccgccagcgtggtgtgcctgctgaacaacttctacccccgcgaggccaaggtgcagtggaaggtggacaacgccctgcagagcggcaacagccaggagagcgtgaccgagcaggactccaaggacagcacctacagcctgagcagcaccctgaccctgagcaaggccgactacgagaagcacaaggtgtacgcctgcgaggtgacccaccagggactgtctagccccgtgaccaagagcttcaaccggggcgagtgctaa

SEQ ID NO: 1713 - DNA, 720 bp, synthetic construct
  misc_feature 1..720: note = 13H12-VH3-hIgG4(S228P)-VL1 LC NT Sequence
  source 1..720: mol_type = other DNA
atggaaaccgacaccctgctgctctgggtgctgctgctctgggtgcccggctccaccggagatatagtgatgacccaaacacctttgtccctgtcagtcaccccaggccaacccgcatctatctcatgcaaatcctcaaaaagtcttttgcactctgacgggataacatatctctactggtatcttcaaaaacctggtcagtccccccagctcttgatctatagaatgagtaaccttgcctctggtgtccccgaccggtttagtggaagcgggtctgggaccgacttcaccctcaagattagtcgcgtcgaagccgaagatgtgggagtgtattactgtgcccagatgctcgaatttcccctgacatttggtcaaggaactaaattggagattaagcggaccgtggccgcccccagcgtgttcatcttccctcccagcgacgagcagctgaagtctggcaccgccagcgtggtgtgcctgctgaacaacttctacccccgcgaggccaaggtgcagtggaaggtggacaacgccctgcagagcggcaacagccaggagagcgtgaccgagcaggactccaaggacagcacctacagcctgagcagcaccctgaccctgagcaaggccgactacgagaagcacaaggtgtacgcctgcgaggtgacccaccagggactgtctagccccgtgaccaagagcttcaaccggggcgagtgctaa

SEQ ID NO: 1714 - DNA, 705 bp, synthetic construct
  misc_feature 1..705: note = 19B5-H1L1-hIgG4(S228P) LC NT Sequence
  source 1..705: mol_type = other DNA
atggaaaccgacaccctgctgctctgggtgctgctgctctgggtgcccggctccaccggagatattcaaatgactcaatctcctagctctctgtccgctagtgtcggtgatagagtcacaattacatgcagagcttctcaagggatcaataattatcttaattggtatcagcagaaacctgggaaagtgccaaagctgctgatctattacgccagtaccctccactcaggtgttccctcacgtttttccggctccggcagcggtacagattatacactcactatcagttccttgcaacccgaagacgtagcaacctattattgccagcagtattcacaagtaccttatacattcgggcaggggacaaaacttgaaataaagaggaccgtggccgcccccagcgtgttcatcttccctcccagcgacgagcagctgaagtctggcaccgccagcgtggtgtgcctgctgaacaacttctacccccgcgaggccaaggtgcagtggaaggtggacaacgccctgcagagcggcaacagccaggagagcgtgaccgagcaggactccaaggacagcacctacagcctgagcagcaccctgaccctgagcaaggccgactacgagaagcacaaggtgtacgcctgcgaggtgacccaccagggactgtctagccccgtgaccaagagcttcaaccggggcgagtgctaa

SEQ ID NO: 1715 - DNA, 720 bp, synthetic construct
  misc_feature 1..720: note = 14H10.2C9-hIgG4(S228P) LC NT Sequence
  source 1..720: mol_type = other DNA
atggaaaccgacaccctgctgctctgggtgctgctgctctgggtgcccggctccaccggagatgttgtgatgacccagactccactcactttgtcggttaccattggacaaccagcctccatctcttgcaagtcaagtcagagcctcttcgatagtgatggaaagacatatttgaattggttgttacagaggccaggccagtctccaaagcgcctaatctatctggtgtctaaactggactctggagtccctgacaggttcactggcagtggatcagggacagatttcacactgaaaatcagcagagtggaggctgaggatttgggagtttattattgctggcaaggtacacattttcctctcacgttcggtgctgggaccaagctggaaatgaaacggaccgtggccgcccccagcgtgttcatcttccctcccagcgacgagcagctgaagtctggcaccgccagcgtggtgtgcctgctgaacaacttctacccccgcgaggccaaggtgcagtggaaggtggacaacgccctgcagagcggcaacagccaggagagcgtgaccgagcaggactccaaggacagcacctacagcctgagcagcaccctgaccctgagcaaggccgactacgagaagcacaaggtgtacgcctgcgaggtgacccaccagggactgtctagccccgtgaccaagagcttcaaccggggcgagtgctaa

SEQ ID NO: 1716 - DNA, 705 bp, synthetic construct
  misc_feature 1..705: note = 15G7.2A7-hIgG4(S228P) LC NT Sequence
  source 1..705: mol_type = other DNA
atggaaaccgacaccctgctgctctgggtgctgctgctctgggtgcccggctccaccggagacatccagatgaaccagtctccatccagtctgtctgcatccctcggagacacaatttccatcacttgccgtgccagtcagaacattaatatttggttaagctggtaccagcagaaaccaggaaatattcctcaactattgatctataaggcttccaacttgcacacaggcgtcccctcaaggtttagtggcagtggatctggaacagatttcacattaaccatcagcagtctgcagcctgaagacattgccacttactactgtctacagggtcaaagttatcctctcacgttcggtgctgggaccaagctggtgatgaaacggaccgtggccgcccccagcgtgttcatcttccctcccagcgacgagcagctgaagtctggcaccgccagcgtggtgtgcctgctgaacaacttctacccccgcgaggccaaggtgcagtggaaggtggacaacgccctgcagagcggcaacagccaggagagcgtgaccgagcaggactccaaggacagcacctacagcctgagcagcaccctgaccctgagcaaggccgactacgagaagcacaaggtgtacgcctgcgaggtgacccaccagggactgtctagccccgtgaccaagagcttcaaccggggcgagtgctaa

SEQ ID NO: 1717 - DNA, 705 bp, synthetic construct
  misc_feature 1..705: note = MOPC21-hIgG4(S228P) LC NT Sequence
  source 1..705: mol_type = other DNA
atggaaaccgacaccctgctgctctgggtgctgctgctctgggtgcccggctccaccggaaacatcgtgatgacacagtcccccaaatccatgtccatgtccgtgggcgagagggtgacactgacatgcaaagcctccgagaacgtggtgacatacgtgtcctggtaccagcagaaacccgagcagtcccccaaactgctgatctacggcgcctccaacaggtacacaggcgtgcccgacaggttcacaggctccggctccgccacagacttcacactgacaatctcctccgtgcaggccgaggacctggccgactaccactgcggccagggctactcctacccctacacattcggcggcggcacaaaactggagatcaaacggaccgtggccgcccccagcgtgttcatcttccctcccagcgacgagcagctgaagtctggcaccgccagcgtggtgtgcctgctgaacaacttctacccccgcgaggccaaggtgcagtggaaggtggacaacgccctgcagagcggcaacagccaggagagcgtgaccgagcaggactccaaggacagcacctacagcctgagcagcaccctgaccctgagcaaggccgactacgagaagcacaaggtgtacgcctgcgaggtgacccaccagggactgtctagccccgtgaccaagagcttcaaccggggcgagtgctaa

SEQ ID NO: 1718 - DNA, 720 bp, synthetic construct
  misc_feature 1..720: note = 846.1H12-hIgG4(S228P) LC NT Sequence
  source 1..720: mol_type = other DNA
atggaaaccgacaccctgctgctctgggtgctgctgctctgggtgcccggctccaccggaaacattatgatgacacagtcgccatcatctctggctgtgtctgcaggacaaaaggtcactatgagctgtaagtccagtcaaagtgttttatacagttcaagtcagaagaactacttggcctggtaccagcagaaaccagggcagtctcctaaacttctgatctactgggcatccactagggaatctggtgtccctgatcgcttctcaggcagtggatctgggacagattttactcttaccatcagcagtgtacaacctgaagacctggcagtttattactgtcatcaatacctctcctcgctcacgttcggtgctgggaccaagctggagctgaaacggaccgtggccgcccccagcgtgttcatcttccctcccagcgacgagcagctgaagtctggcaccgccagcgtggtgtgcctgctgaacaacttctacccccgcgaggccaaggtgcagtggaaggtggacaacgccctgcagagcggcaacagccaggagagcgtgaccgagcaggactccaaggacagcacctacagcctgagcagcaccctgaccctgagcaaggccgactacgagaagcacaaggtgtacgcctgcgaggtgacccaccagggactgtctagccccgtgaccaagagcttcaaccggggcgagtgctaa

SEQ ID NO: 1719 - DNA, 720 bp, synthetic construct
  misc_feature 1..720: note = 846.2H3-hIgG4(S228P)LC NT Sequence
  source 1..720: mol_type = other DNA
atggaaaccgacaccctgctgctctgggtgctgctgctctgggtgcccggctccaccggaaacattatgatgacacagtcgccatcatctctggctgtgtctgcaggagaaaaggtcactatgagctgtaagtccagtcaaagtgttttatacagttcaaatcagaagaactacttggcctggtaccagcagaaaccagggcagtctcctaaactgctgatctactgggcatccactagggaatctggtgtccctgatcgcttcacaggcagtggatctgggacagattttactcttaccatcagcagtgtacaacctgaagacctggcagtttattactgtcatcaatacctctcctcgctcacgttcggtgctgggaccaagctggagctgaaacggaccgtggccgcccccagcgtgttcatcttccctcccagcgacgagcagctgaagtctggcaccgccagcgtggtgtgcctgctgaacaacttctacccccgcgaggccaaggtgcagtggaaggtggacaacgccctgcagagcggcaacagccaggagagcgtgaccgagcaggactccaaggacagcacctacagcctgagcagcaccctgaccctgagcaaggccgactacgagaagcacaaggtgtacgcctgcgaggtgacccaccagggactgtctagccccgtgaccaagagcttcaaccggggcgagtgctaa

SEQ ID NO: 1720 - DNA, 720 bp, synthetic construct; identical to SEQ ID NO: 1719
  misc_feature 1..720: note = 846.1F5-hIgG4(S228P)LC NT Sequence
  source 1..720: mol_type = other DNA

SEQ ID NO: 1721 - DNA, 720 bp, synthetic construct
  misc_feature 1..720: note = 846T.16B5-hIgG4(S228P) LC NT Sequence
  source 1..720: mol_type = other DNA
atggaaaccgacaccctgctgctctgggtgctgctgctctgggtgcccggctccaccggaaacattatgatgacacagtcgccatcatctctggctgtgtctgcaggagaaaaggtcactatgagctgtaagtccagtcaaagtgttttatacagttcaaatcagaagaactacttggcctggtaccagcagaaaccagggcagtctcctaaactactgatctactgggcatccactagggaatctggtgtccctgatcgcttcacaggcagtggatctgggacagattttactcttaccatcagcagtgtacaagctgaagacctggcagtttattactgtcatcaatacctctcctcgctcacgttcggtgctgggaccaagctggagctgaaacggaccgtggccgcccccagcgtgttcatcttccctcccagcgacgagcagctgaagtctggcaccgccagcgtggtgtgcctgctgaacaacttctacccccgcgaggccaaggtgcagtggaaggtggacaacgccctgcagagcggcaacagccaggagagcgtgaccgagcaggactccaaggacagcacctacagcctgagcagcaccctgaccctgagcaaggccgactacgagaagcacaaggtgtacgcctgcgaggtgacccaccagggactgtctagccccgtgaccaagagcttcaaccggggcgagtgctaa

SEQ ID NO: 1722 - DNA, 705 bp, synthetic construct
  misc_feature 1..705: note = 20D11.2C6-hIgG4(S228P) LC NT Sequence
  source 1..705: mol_type = other DNA
atggaaaccgacaccctgctgctctgggtgctgctgctctgggtgcccggctccaccggagacatccagatgaaccagtctccatccagtctgtctgcatccctcggagacacaattaccatcacttgccgtgccagtcagaacatttatatttggttaagttggtaccagcagaaaccaggaaatattcctaaactcttgatctataaggcttccaacttgcacacaggcgtcccatcaaggtttagtggcagtggatctggaacagatttcacattaaccatcagcactctgcagcctgaagacattgccacttacttctgtctccagggtcaaagttatcctctcacgttcggtgctgggaccaagctggagatgaaacggaccgtggccgcccccagcgtgttcatcttccctcccagcgacgagcagctgaagtctggcaccgccagcgtggtgtgcctgctgaacaacttctacccccgcgaggccaaggtgcagtggaaggtggacaacgccctgcagagcggcaacagccaggagagcgtgaccgagcaggactccaaggacagcacctacagcctgagcagcaccctgaccctgagcaaggccgactacgagaagcacaaggtgtacgcctgcgaggtgacccaccagggactgtctagccccgtgaccaagagcttcaaccggggcgagtgctaa

SEQ ID NO: 1723 - DNA, 720 bp, synthetic construct
  misc_feature 1..720: note = 15G7.2A7-hIgG4(S228P) LC NT Sequence
  source 1..720: mol_type = other DNA
atggaaaccgacaccctgctgctctgggtgctgctgctctgggtgcccggctccaccggagacatcgtgctgacccagtctccactgagcctgcctgttacacctggcgagccagcctccatctcctgcagatcctctaagtccctgctgtacaaggacggcaagacctacctgaactggttcctgcagaagcccggccagtctcctcagctcctgatctacctgatgagcacccatgcctctggcgtgcccgatagattttccggctctggctctggcaccgacttcaccctgaagatctccagagtggaagccgaggacgtgggcgtgtactactgtcagcagctggtggactaccctctgacctttggcggcggaacaaagctggaaatcaagcggaccgtggccgcccccagcgtgttcatcttccctcccagcgacgagcagctgaagtctggcaccgccagcgtggtgtgcctgctgaacaacttctacccccgcgaggccaaggtgcagtggaaggtggacaacgccctgcagagcggcaacagccaggagagcgtgaccgagcaggactccaaggacagcacctacagcctgagcagcaccctgaccctgagcaaggccgactacgagaagcacaaggtgtacgcctgcgaggtgacccaccagggactgtctagccccgtgaccaagagcttcaaccggggcgagtgctaa

SEQ ID NO: 1724 - DNA, 705 bp, synthetic construct
  misc_feature 1..705: note = IMT001-4-HCLC (TB001) LC NT Sequence
  source 1..705: mol_type = other DNA
atggaaaccgacaccctgctgctctgggtgctgctgctctgggtgcccggctccaccggagacatccaggtgattcagtctccatccagtctgtctgcatcccttggagacacaattaccatcacttgccatgccagtcagaacattaatgtttggttaagctggtaccagcagaaaccaggaaatattcctaaactattgatctataaggcttccaacttgcacacaggcgtcccatcaaggtttagtggcagtggatctggaacaggtttcacattaaccatcagcagcctgcagcctgaagacattgccacttactactgtcaacagggtcaaagttatccgtacacgttcggaggggggaccaagctggagctgaaacggaccgtggccgcccccagcgtgttcatcttccctcccagcgacgagcagctgaagtctggcaccgccagcgtggtgtgcctgctgaacaacttctacccccgcgaggccaaggtgcagtggaaggtggacaacgccctgcagagcggcaacagccaggagagcgtgaccgagcaggactccaaggacagcacctacagcctgagcagcaccctgaccctgagcaaggccgactacgagaagcacaaggtgtacgcctgcgaggtgacccaccagggactgtctagccccgtgaccaagagcttcaaccggggcgagtgctaa

SEQ ID NO: 1725 - DNA, 711 bp, synthetic construct
  misc_feature 1..711: note = 846T.14A2-hIgG4(S338P) LC NT Sequence
  source 1..711: mol_type = other DNA
atggaaaccgacaccctgctgctctgggtgctgctgctctgggtgcccggctccaccggacaggctgttgtgactcaggaatctgcactcaccacatcacctggtgaaacagtcacactcacttgtcgctcaagtactggggctgttacaactagtaactatgccaactgggtccaagaaaaaccagatcatttattcactggtctaataggtggtatcaataaccgagttccaggtgttcctgccagattctcaggctccctgattggagacaaggcagccctcaccatcacaggggcacagactgaggatgaggcaatatatttctgtgctctatggtatagcaaccattgggtgttcggtggaggaaccaaactgactgtcctacggaccgtggccgcccccagcgtgttcatcttccctcccagcgacgagcagctgaagtctggcaccgccagcgtggtgtgcctgctgaacaacttctacccccgcgaggccaaggtgcagtggaaggtggacaacgccctgcagagcggcaacagccaggagagcgtgaccgagcaggactccaaggacagcacctacagcctgagcagcaccctgaccctgagcaaggccgactacgagaagcacaaggtgtacgcctgcgaggtgacccaccagggactgtctagccccgtgaccaagagcttcaaccggggcgagtgctaa

SEQ ID NO: 1726 - DNA, 705 bp, synthetic construct
  misc_feature 1..705: note = 798-9.20H5.A3-mH1mL0-hIgG4(S228P) LC NT Sequence
  source 1..705: mol_type = other DNA
atggaaaccgacaccctgctgctctgggtgctgctgctctgggtgcccggctccaccggagatatccagatgacacagactacatcctccctgtctgcctctctgggagacagagtcaccatcaattgcagtgcaagtcaggacattagcaattatttaaactggtatcagcagaaaccagatggaactgttaaactcctgatctattacacatcaagtttactctcaggagtcccatcaaggttcagtggcagtgggtctgggacagattattctctcaccatcagcaacctggaacctgaagatattgccacttacttttgtcagcaatatagtaagcttccctatacgttcggatcggggacccacctggaaataaaacggaccgtggccgcccccagcgtgttcatcttccctcccagcgacgagcagctgaagtctggcaccgccagcgtggtgtgcctgctgaacaacttctacccccgcgaggccaaggtgcagtggaaggtggacaacgccctgcagagcggcaacagccaggagagcgtgaccgagcaggactccaaggacagcacctacagcctgagcagcaccctgaccctgagcaaggccgactacgagaagcacaaggtgtacgcctgcgaggtgacccaccagggactgtctagccccgtgaccaagagcttcaaccggggcgagtgctaa

SEQ ID NO: 1727 - DNA, 720 bp, synthetic construct
  misc_feature 1..720: note = F847C.21H6-hIgG4(S228P) LC NT Sequence
  source 1..720: mol_type = other DNA
atggaaaccgacaccctgctgctctgggtgctgctgctctgggtgcccggctccaccggagatgtcgttatgactcagaccccactcacgctctcagtgaccatcggacagcctgccagcatctcatgtaaaagtagtcgcagcctgttagattctgacggcaagacctatctgaactggctgctgcagcgtcctggccagagcccaaaaaggctgatctatctcgtctcaaagctggattcaggagtccccgatcggtttacgggtagcggatctggcaccgacttcacactgaagatttctcgggttgaagccgaagatttgggcgtctactattgctggcaaggaacacacttccctcagacctttggcggcggcacaaagctggaaattaataggaccgtggccgcccccagcgtgttcatcttccctcccagcgacgagcagctgaagtctggcaccgccagcgtggtgtgcctgctgaacaacttctacccccgcgaggccaaggtgcagtggaaggtggacaacgccctgcagagcggcaacagccaggagagcgtgaccgagcaggactccaaggacagcacctacagcctgagcagcaccctgaccctgagcaaggccgactacgagaagcacaaggtgtacgcctgcgaggtgacccaccagggactgtctagccccgtgaccaagagcttcaaccggggcgagtgctaa

SEQ ID NO: 1728 - DNA, 720 bp, synthetic construct
  misc_feature 1..720: note = 798-9.19D9.2E5-hIgG4(S228P)-mV2 LC NT Sequence
  source 1..720: mol_type = other DNA
atggaaaccgacaccctgctgctctgggtgctgctgctctgggtgcccggctccaccggagatgctttgatgacccaaactccactcactttgtcggttaccattggacaaccagcctccatctcttgtaagtcaagtcagagcctcttacatagtgatggaaagacatatttgaattggttgttacagaggccaggccagcctccaaagcgcctaatgtatctggtgtctacactggactctggagtccctgacaggttcactggcagtggatcagggacagatttcacactgaaaatcagcagagtggaggctgaggatttgggagtttattattgctggcaaggtacacattttcctctcacgttcggtgctgggaccaagctggagctgaaaaggaccgtggccgcccccagcgtgttcatcttccctcccagcgacgagcagctgaagtctggcaccgccagcgtggtgtgcctgctgaacaacttctacccccgcgaggccaaggtgcagtggaaggtggacaacgccctgcagagcggcaacagccaggagagcgtgaccgagcaggactccaaggacagcacctacagcctgagcagcaccctgaccctgagcaaggccgactacgagaagcacaaggtgtacgcctgcgaggtgacccaccagggactgtctagccccgtgaccaagagcttcaaccggggcgagtgctaa

SEQ ID NO: 1729 - protein, 239 aa, synthetic construct
  REGION 1..239: note = 4A11-VH3-hIgG4(S228P)-VL1 (TB006) LC AA Sequence w/SS
METDTLLLWVLLLWVPGSTGDVVMTQSPLSLPVTLGQPASISCRSSQSLFHSDGKTYLNWLQQRPGQSPRRLIYLVSKRDSGVPDRFSGSGSGTDFTLKISRVEAEDVGVYYCWQGTHFPLTFGGGTKVEIKRTVAAPSVFIFPPSDEQLKSGTASVVCLLNNFYPREAKVQWKVDNALQSGNSQESVTEQDSKDSTYSLSSTLTLSKADYEKHKVYACEVTHQGLSSPVTKSFNRGEC

SEQ ID NO: 1730 - protein, 239 aa, synthetic construct
  REGION 1..239: note = 13H12-VH3-hIgG4(S228P)-VL1 LC AA Sequence w/SS
METDTLLLWVLLLWVPGSTGDIVMTQTPLSLSVTPGQPASISCKSSKSLLHSDGITYLYWYLQKPGQSPQLLIYRMSNLASGVPDRFSGSGSGTDFTLKISRVEAEDVGVYYCAQMLEFPLTFGQGTKLEIKRTVAAPSVFIFPPSDEQLKSGTASVVCLLNNFYPREAKVQWKVDNALQSGNSQESVTEQDSKDSTYSLSSTLTLSKADYEKHKVYACEVTHQGLSSPVTKSFNRGEC

SEQ ID NO: 1731 - protein, 234 aa, synthetic construct
  REGION 1..234: note = 19B5-H1L1-hIgG4(S228P) LC AA Sequence w/SS
METDTLLLWVLLLWVPGSTGDIQMTQSPSSLSASVGDRVTITCRASQGINNYLNWYQQKPGKVPKLLIYYASTLHSGVPSRFSGSGSGTDYTLTISSLQPEDVATYYCQQYSQVPYTFGQGTKLEIKRTVAAPSVFIFPPSDEQLKSGTASVVCLLNNFYPREAKVQWKVDNALQSGNSQESVTEQDSKDSTYSLSSTLTLSKADYEKHKVYACEVTHQGLSSPVTKSFNRGEC

SEQ ID NO: 1732 - protein, 239 aa, synthetic construct
  REGION 1..239: note = 14H10.2C9-hIgG4(S228P) LC AA Sequence w/SS
METDTLLLWVLLLWVPGSTGDVVMTQTPLTLSVTIGQPASISCKSSQSLFDSDGKTYLNWLLQRPGQSPKRLIYLVSKLDSGVPDRFTGSGSGTDFTLKISRVEAEDLGVYYCWQGTHFPLTFGAGTKLEMKRTVAAPSVFIFPPSDEQLKSGTASVVCLLNNFYPREAKVQWKVDNALQSGNSQESVTEQDSKDSTYSLSSTLTLSKADYEKHKVYACEVTHQGLSSPVTKSFNRGEC

SEQ ID NO: 1733 - protein, 234 aa, synthetic construct
  REGION 1..234: note = 15G7.2A7-hIgG4(S228P) LC AA Sequence w/SS
METDTLLLWVLLLWVPGSTGDIQMNQSPSSLSASLGDTISITCRASQNINIWLSWYQQKPGNIPQLLIYKASNLHTGVPSRFSGSGSGTDFTLTISSLQPEDIATYYCLQGQSYPLTFGAGTKLVMKRTVAAPSVFIFPPSDEQLKSGTASVVCLLNNFYPREAKVQWKVDNALQSGNSQESVTEQDSKDSTYSLSSTLTLSKADYEKHKVYACEVTHQGLSSPVTKSFNRGEC

SEQ ID NO: 1734 - protein, 234 aa, synthetic construct
  REGION 1..234: note = MOPC21-hIgG4(S228P) LC AA Sequence w/SS
METDTLLLWVLLLWVPGSTGNIVMTQSPKSMSMSVGERVTLTCKASENVVTYVSWYQQKPEQSPKLLIYGASNRYTGVPDRFTGSGSATDFTLTISSVQAEDLADYHCGQGYSYPYTFGGGTKLEIKRTVAAPSVFIFPPSDEQLKSGTASVVCLLNNFYPREAKVQWKVDNALQSGNSQESVTEQDSKDSTYSLSSTLTLSKADYEKHKVYACEVTHQGLSSPVTKSFNRGEC

SEQ ID NO: 1735 - protein, 239 aa, synthetic construct
  REGION 1..239: note = 846.1H12-hIgG4(S228P) LC AA Sequence w/SS
METDTLLLWVLLLWVPGSTGNIMMTQSPSSLAVSAGQKVTMSCKSSQSVLYSSSQKNYLAWYQQKPGQSPKLLIYWASTRESGVPDRFSGSGSGTDFTLTISSVQPEDLAVYYCHQYLSSLTFGAGTKLELKRTVAAPSVFIFPPSDEQLKSGTASVVCLLNNFYPREAKVQWKVDNALQSGNSQESVTEQDSKDSTYSLSSTLTLSKADYEKHKVYACEVTHQGLSSPVTKSFNRGEC

SEQ ID NO: 1736 - protein, 239 aa, synthetic construct
  REGION 1..239: note = 846.2H3-hIgG4(S228P)LC AA Sequence w/SS
METDTLLLWVLLLWVPGSTGNIMMTQSPSSLAVSAGEKVTMSCKSSQSVLYSSNQKNYLAWYQQKPGQSPKLLIYWASTRESGVPDRFTGSGSGTDFTLTISSVQPEDLAVYYCHQYLSSLTFGAGTKLELKRTVAAPSVFIFPPSDEQLKSGTASVVCLLNNFYPREAKVQWKVDNALQSGNSQESVTEQDSKDSTYSLSSTLTLSKADYEKHKVYACEVTHQGLSSPVTKSFNRGEC

SEQ ID NO: 1737 - protein, 239 aa, synthetic construct; identical to SEQ ID NO: 1736
  REGION 1..239: note = 846.1F5-hIgG4(S228P)LC AA Sequence w/SS

SEQ ID NO: 1738 - protein, 239 aa, synthetic construct
  REGION 1..239: note = 846T.16B5-hIgG4(S228P) LC AA Sequence w/SS
METDTLLLWVLLLWVPGSTGNIMMTQSPSSLAVSAGEKVTMSCKSSQSVLYSSNQKNYLAWYQQKPGQSPKLLIYWASTRESGVPDRFTGSGSGTDFTLTISSVQAEDLAVYYCHQYLSSLTFGAGTKLELKRTVAAPSVFIFPPSDEQLKSGTASVVCLLNNFYPREAKVQWKVDNALQSGNSQESVTEQDSKDSTYSLSSTLTLSKADYEKHKVYACEVTHQGLSSPVTKSFNRGEC

SEQ ID NO: 1739 - protein, 234 aa, synthetic construct
  REGION 1..234: note = 20D11.2C6-hIgG4(S228P) LC AA Sequence w/SS
METDTLLLWVLLLWVPGSTGDIQMNQSPSSLSASLGDTITITCRASQNIYIWLSWYQQKPGNIPKLLIYKASNLHTGVPSRFSGSGSGTDFTLTISTLQPEDIATYFCLQGQSYPLTFGAGTKLEMKRTVAAPSVFIFPPSDEQLKSGTASVVCLLNNFYPREAKVQWKVDNALQSGNSQESVTEQDSKDSTYSLSSTLTLSKADYEKHKVYACEVTHQGLSSPVTKSFNRGEC

SEQ ID NO: 1740 - protein, 239 aa, synthetic construct
  REGION 1..239: note = 15G7.2A7-hIgG4(S228P) LC AA Sequence w/SS
METDTLLLWVLLLWVPGSTGDIVLTQSPLSLPVTPGEPASISCRSSKSLLYKDGKTYLNWFLQKPGQSPQLLIYLMSTHASGVPDRFSGSGSGTDFTLKISRVEAEDVGVYYCQQLVDYPLTFGGGTKLEIKRTVAAPSVFIFPPSDEQLKSGTASVVCLLNNFYPREAKVQWKVDNALQSGNSQESVTEQDSKDSTYSLSSTLTLSKADYEKHKVYACEVTHQGLSSPVTKSFNRGEC

SEQ ID NO: 1741 - protein, 234 aa, synthetic construct
  REGION 1..234: note = IMT001-4-HCLC (TB001) LC AA Sequence w/SS
METDTLLLWVLLLWVPGSTGDIQVIQSPSSLSASLGDTITITCHASQNINVWLSWYQQKPGNIPKLLIYKASNLHTGVPSRFSGSGSGTGFTLTISSLQPEDIATYYCQQGQSYPYTFGGGTKLELKRTVAAPSVFIFPPSDEQLKSGTASVVCLLNNFYPREAKVQWKVDNALQSGNSQESVTEQDSKDSTYSLSSTLTLSKADYEKHKVYACEVTHQGLSSPVTKSFNRGEC

SEQ ID NO: 1742 - protein, 236 aa, synthetic construct
  REGION 1..236: note = 846T.14A2-hIgG4(S338P) LC AA Sequence w/SS
METDTLLLWVLLLWVPGSTGQAVVTQESALTTSPGETVTLTCRSSTGAVTTSNYANWVQEKPDHLFTGLIGGINNRVPGVPARFSGSLIGDKAALTITGAQTEDEAIYFCALWYSNHWVFGGGTKLTVLRTVAAPSVFIFPPSDEQLKSGTASVVCLLNNFYPREAKVQWKVDNALQSGNSQESVTEQDSKDSTYSLSSTLTLSKADYEKHKVYACEVTHQGLSSPVTKSFNRGEC

SEQ ID NO: 1743 - protein, 234 aa, synthetic construct
  REGION 1..234: note = 798-9.20H5.A3-mH1mL0-hIgG4(S228P) LC AA Sequence w/SS
METDTLLLWVLLLWVPGSTGDIQMTQTTSSLSASLGDRVTINCSASQDISNYLNWYQQKPDGTVKLLIYYTSSLLSGVPSRFSGSGSGTDYSLTISNLEPEDIATYFCQQYSKLPYTFGSGTHLEIKRTVAAPSVFIFPPSDEQLKSGTASVVCLLNNFYPREAKVQWKVDNALQSGNSQESVTEQDSKDSTYSLSSTLTLSKADYEKHKVYACEVTHQGLSSPVTKSFNRGEC

SEQ ID NO: 1744 - protein, 239 aa, synthetic construct
  REGION 1..239: note = F847C.21H6-hIgG4(S228P) LC AA Sequence w/SS
METDTLLLWVLLLWVPGSTGDVVMTQTPLTLSVTIGQPASISCKSSRSLLDSDGKTYLNWLLQRPGQSPKRLIYLVSKLDSGVPDRFTGSGSGTDFTLKISRVEAEDLGVYYCWQGTHFPQTFGGGTKLEINRTVAAPSVFIFPPSDEQLKSGTASVVCLLNNFYPREAKVQWKVDNALQSGNSQESVTEQDSKDSTYSLSSTLTLSKADYEKHKVYACEVTHQGLSSPVTKSFNRGEC

SEQ ID NO: 1745 - protein, 239 aa, synthetic construct
  REGION 1..239: note = 798-9.19D9.2E5-hIgG4(S228P)-mV2 LC AA Sequence w/SS
METDTLLLWVLLLWVPGSTGDALMTQTPLTLSVTIGQPASISCKSSQSLLHSDGKTYLNWLLQRPGQPPKRLMYLVSTLDSGVPDRFTGSGSGTDFTLKISRVEAEDLGVYYCWQGTHFPLTFGAGTKLELKRTVAAPSVFIFPPSDEQLKSGTASVVCLLNNFYPREAKVQWKVDNALQSGNSQESVTEQDSKDSTYSLSSTLTLSKADYEKHKVYACEVTHQGLSSPVTKSFNRGEC

SEQ ID NO: 1746 - protein, 219 aa, synthetic construct
  REGION 1..219: note = 4A11-VH3-hIgG4(S228P)-VL1 (TB006) LC AA Sequence w/o SS
DVVMTQSPLSLPVTLGQPASISCRSSQSLFHSDGKTYLNWLQQRPGQSPRRLIYLVSKRDSGVPDRFSGSGSGTDFTLKISRVEAEDVGVYYCWQGTHFPLTFGGGTKVEIKRTVAAPSVFIFPPSDEQLKSGTASVVCLLNNFYPREAKVQWKVDNALQSGNSQESVTEQDSKDSTYSLSSTLTLSKADYEKHKVYACEVTHQGLSSPVTKSFNRGEC

SEQ ID NO: 1747 - protein, 219 aa, synthetic construct; identical to SEQ ID NO: 496
  REGION 1..219: note = 13H12-VH3-hIgG4(S228P)-VL1 LC AA Sequence w/o SS

SEQ ID NO: 1748 - protein, 214 aa, synthetic construct
  REGION 1..214: note = 19B5-H1L1-hIgG4(S228P) LC AA Sequence w/o SS
DIQMTQSPSSLSASVGDRVTITCRASQGINNYLNWYQQKPGKVPKLLIYYASTLHSGVPSRFSGSGSGTDYTLTISSLQPEDVATYYCQQYSQVPYTFGQGTKLEIKRTVAAPSVFIFPPSDEQLKSGTASVVCLLNNFYPREAKVQWKVDNALQSGNSQESVTEQDSKDSTYSLSSTLTLSKADYEKHKVYACEVTHQGLSSPVTKSFNRGEC

SEQ ID NO: 1749 - protein, 219 aa, synthetic construct
  REGION 1..219: note = 14H10.2C9-hIgG4(S228P) LC AA Sequence w/o SS
DVVMTQTPLTLSVTIGQPASISCKSSQSLFDSDGKTYLNWLLQRPGQSPKRLIYLVSKLDSGVPDRFTGSGSGTDFTLKISRVEAEDLGVYYCWQGTHFPLTFGAGTKLEMKRTVAAPSVFIFPPSDEQLKSGTASVVCLLNNFYPREAKVQWKVDNALQSGNSQESVTEQDSKDSTYSLSSTLTLSKADYEKHKVYACEVTHQGLSSPVTKSFNRGEC

SEQ ID NO: 1750 - protein, 219 aa, synthetic construct; identical to SEQ ID NO: 1749
  REGION 1..219: note = 15G7.2A7-hIgG4(S228P) LC AA Sequence w/o SS

SEQ ID NO: 1751 - protein, 214 aa, synthetic construct
  REGION 1..214: note = MOPC21-hIgG4(S228P) LC AA Sequence w/o SS
NIVMTQSPKSMSMSVGERVTLTCKASENVVTYVSWYQQKPEQSPKLLIYGASNRYTGVPDRFTGSGSATDFTLTISSVQAEDLADYHCGQGYSYPYTFGGGTKLEIKRTVAAPSVFIFPPSDEQLKSGTASVVCLLNNFYPREAKVQWKVDNALQSGNSQESVTEQDSKDSTYSLSSTLTLSKADYEKHKVYACEVTHQGLSSPVTKSFNRGEC

SEQ ID NO: 1752 - protein, 219 aa, synthetic construct; identical to SEQ ID NO: 523
  REGION 1..219: note = 846.1H12-hIgG4(S228P) LC AA Sequence w/o SS

SEQ ID NO: 1753 - protein, 219 aa, synthetic construct; identical to SEQ ID NO: 522
  REGION 1..219: note = 846.2H3-hIgG4(S228P)LC AA Sequence w/o SS

SEQ ID NO: 1754 - protein, 219 aa, synthetic construct; identical to SEQ ID NO: 522
  REGION 1..219: note = 846.1F5-hIgG4(S228P)LC AA Sequence w/o SS

SEQ ID NO: 1755 - protein, 219 aa, synthetic construct; identical to SEQ ID NO: 527
  REGION 1..219: note = 846T.16B5-hIgG4(S228P) LC AA Sequence w/o SS

SEQ ID NO: 1756 - protein, 214 aa, synthetic construct
  REGION 1..214: note = 20D11.2C6-hIgG4(S228P) LC AA Sequence w/o SS
DIQMNQSPSSLSASLGDTITITCRASQNIYIWLSWYQQKPGNIPKLLIYKASNLHTGVPSRFSGSGSGTDFTLTISTLQPEDIATYFCLQGQSYPLTFGAGTKLEMKRTVAAPSVFIFPPSDEQLKSGTASVVCLLNNFYPREAKVQWKVDNALQSGNSQESVTEQDSKDSTYSLSSTLTLSKADYEKHKVYACEVTHQGLSSPVTKSFNRGEC

SEQ ID NO: 1757 - protein, 219 aa, synthetic construct; identical to SEQ ID NO: 495
  REGION 1..219: note = 15G7.2A7-hIgG4(S228P) LC AA Sequence w/o SS

SEQ ID NO: 1758 - protein, 214 aa, synthetic construct; identical to SEQ ID NO: 531
  REGION 1..214: note = IMT001-4-HCLC (TB001) LC AA Sequence w/o SS

SEQ ID NO: 1759 - protein, 216 aa, synthetic construct; identical to SEQ ID NO: 525
  REGION 1..216: note = 846T.14A2-hIgG4(S338P) LC AA Sequence w/o SS

SEQ ID NO: 1760 - protein, 214 aa, synthetic construct; identical to SEQ ID NO: 1196
  REGION 1..214: note = 798-9.20H5.A3-mH1mL0-hIgG4(S228P) LC AA Sequence w/o SS

SEQ ID NO: 1761 - protein, 219 aa, synthetic construct; identical to SEQ ID NO: 1412
  REGION 1..219: note = F847C.21H6-hIgG4(S228P) LC AA Sequence w/o SS

SEQ ID NO: 1762 - protein, 219 aa, synthetic construct
  REGION 1..219: note = 798-9.19D9.2E5-hIgG4(S228P)-mV2 LC AA Sequence w/o SS
DALMTQTPLTLSVTIGQPASISCKSSQSLLHSDGKTYLNWLLQRPGQPPKRLMYLVSTLDSGVPDRFTGSGSGTDFTLKISRVEAEDLGVYYCWQGTHFPLTFGAGTKLELKRTVAAPSVFIFPPSDEQLKSGTASVVCLLNNFYPREAKVQWKVDNALQSGNSQESVTEQDSKDSTYSLSSTLTLSKADYEKHKVYACEVTHQGLSSPVTKSFNRGEC

SEQ ID NO: 1763 - protein, 8 aa, synthetic construct
  REGION 1..8: note = 4A11-VH3-hIgG4(S228P)-VL1 (TB006) CDRH1 Sequence
GYTFTEYT

SEQ ID NO: 1764 - protein, 8 aa, synthetic construct
  REGION 1..8: note = 13H12-VH3-hIgG4(S228P)-VL1 CDRH1 Sequence
GYSFTNYY

SEQ ID NO: 1765 - protein, 8 aa, synthetic construct
  REGION 1..8: note = 19B5-H1L1-hIgG4(S228P) CDRH1 Sequence
GYTFTTYA

SEQ ID NO: 1766 - protein, 8 aa, synthetic construct
  REGION 1..8: note = 14H10.2C9-hIgG4(S228P) CDRH1 Sequence
GYTFTTYG

SEQ ID NO: 1767 - protein, 8 aa, synthetic construct
  REGION 1..8: note = 15G7.2A7-hIgG4(S228P) CDRH1 Sequence
GYTFTDYY

SEQ ID NO: 1768 - protein, 8 aa, synthetic construct
  REGION 1..8: note = MOPC21-hIgG4(S228P) CDRH1 Sequence
GFTFSSFG

SEQ ID NO: 1769 - protein, 8 aa, synthetic construct
  REGION 1..8: note = 846.1H12-hIgG4(S228P) CDRH1 Sequence
GYTFTNFG

SEQ ID NO: 1770 - protein, 8 aa, synthetic construct
  REGION 1..8: note = 846.2H3-hIgG4(S228P)CDRH1 Sequence
GYTFTNYG

SEQ ID NO: 1771 - protein, 8 aa, synthetic construct
  REGION 1..8: note = 846.1F5-hIgG4(S228P)CDRH1 Sequence
GYTFTNYG

SEQ ID NO: 1772 - protein, 8 aa, synthetic construct
  REGION 1..8: note = 846T.16B5-hIgG4(S228P) CDRH1 Sequence
GYTFTNYG

SEQ ID NO: 1773 - protein, 8 aa, synthetic construct
  REGION 1..8: note = 20D11.2C6-hIgG4(S228P) CDRH1 Sequence
GYTFTDFY

SEQ ID NO: 1774 - protein, 8 aa, synthetic construct
  REGION 1..8: note = 15G7.2A7-hIgG4(S228P) CDRH1 Sequence
GYTFTNYG

SEQ ID NO: 1775 - protein, 8 aa, synthetic construct
  REGION 1..8: note = IMT001-4-HCLC (TB001) CDRH1 Sequence
GYTFTNYG

SEQ ID NO: 1776 - protein, 8 aa, synthetic construct
  REGION 1..8: note = 846T.14A2-hIgG4(S338P) CDRH1 Sequence
GYTFTNYG

SEQ ID NO: 1777 - protein, 8 aa, synthetic construct
  REGION 1..8: note = 798-9.20H5.A3-mH1mL0-hIgG4(S228P) CDRH1 Sequence
GYAFTTYG

SEQ ID NO: 1778 - protein, 8 aa, synthetic construct
  REGION 1..8: note = F847C.21H6-hIgG4(S228P) CDRH1 Sequence
GYTFTIFG

SEQ ID NO: 1779 - protein, 8 aa, synthetic construct
  REGION 1..8: note = 798-9.19D9.2E5-hIgG4(S228P)-mV2 CDRH1 Sequence
GYTFTTYG

SEQ ID NO: 1780 - protein, 8 aa, synthetic construct
  REGION 1..8: note = 4A11-VH3-hIgG4(S228P)-VL1 (TB006) CDRH2 Sequence
FYPGSDNI

SEQ ID NO: 1781 - protein, 8 aa, synthetic construct
  REGION 1..8: note = 13H12-VH3-hIgG4(S228P)-VL1 CDRH2 Sequence
IYPGSGNT

SEQ ID NO: 1782 - protein, 8 aa, synthetic construct
  REGION 1..8: note = 19B5-H1L1-hIgG4(S228P) CDRH2 Sequence
INTYSGVP

SEQ ID NO: 1783 - protein, 8 aa, synthetic construct
  REGION 1..8: note = 14H10.2C9-hIgG4(S228P) CDRH2 Sequence
INTYSGVP

SEQ ID NO: 1784 - protein, 8 aa, synthetic construct
  REGION 1..8: note = 15G7.2A7-hIgG4(S228P) CDRH2 Sequence
INPNNGGT

SEQ ID NO: 1785 - protein, 8 aa, synthetic construct
  REGION 1..8: note = MOPC21-hIgG4(S228P) CDRH2 Sequence
ISSGSSTL

SEQ ID NO: 1786 - protein, 8 aa, synthetic construct
  REGION 1..8: note = 846.1H12-hIgG4(S228P) CDRH2 Sequence
INTYTGEP

SEQ ID NO: 1787 - protein, 8 aa, synthetic construct
  REGION 1..8: note = 846.2H3-hIgG4(S228P)CDRH2 Sequence
INTYTGEP

SEQ ID NO: 1788 - protein, 8 aa, synthetic construct
  REGION 1..8: note = 846.1F5-hIgG4(S228P)CDRH2 Sequence
INTYTGEP

SEQ ID NO: 1789 - protein, 8 aa, synthetic construct
  REGION 1..8: note = 846T.16B5-hIgG4(S228P) CDRH2 Sequence
INTYTGEP

SEQ ID NO: 1790 - protein, 8 aa, synthetic construct
  REGION 1..8: note = 20D11.2C6-hIgG4(S228P) CDRH2 Sequence
INPKNGGI

SEQ ID NO: 1791 - protein, 8 aa, synthetic construct
  REGION 1..8: note = 15G7.2A7-hIgG4(S228P) CDRH2 Sequence
INTNTGEP

SEQ ID NO: 1792 - protein, 8 aa, synthetic construct
  REGION 1..8: note = IMT001-4-HCLC (TB001) CDRH2 Sequence
INTYTGEP

SEQ ID NO: 1793 - protein, 8 aa, synthetic construct
  REGION 1..8: note = 846T.14A2-hIgG4(S338P) CDRH2 Sequence
INTYTGEP

SEQ ID NO: 1794 - protein, 8 aa, synthetic construct
  REGION 1..8: note = 798-9.20H5.A3-mH1mL0-hIgG4(S228P) CDRH2 Sequence
VNTYSGVP

SEQ ID NO: 1795 - protein, 8 aa, synthetic construct
  REGION 1..8: note = F847C.21H6-hIgG4(S228P) CDRH2 Sequence
VNTYTGEP

SEQ ID NO: 1796 - protein, 8 aa, synthetic construct
  REGION 1..8: note = 798-9.19D9.2E5-hIgG4(S228P)-mV2 CDRH2 Sequence
INTYSGVP

SEQ ID NO: 1797 - protein, 16 aa, synthetic construct
  REGION 1..16: note = 4A11-VH3-hIgG4(S228P)-VL1 (TB006) CDRH3 Sequence
ARHEEGVITTVSYFDY

SEQ ID NO: 1798 - protein, 9 aa, synthetic construct
  REGION 1..9: note = 13H12-VH3-hIgG4(S228P)-VL1 CDRH3 Sequence
STAPGGFDV

SEQ ID NO: 1799 - protein, 9 aa, synthetic construct
  REGION 1..9: note = 19B5-H1L1-hIgG4(S228P) CDRH3 Sequence
ARGPYAMDY

SEQ ID NO: 1800 - protein, 10 aa, synthetic construct
  REGION 1..10: note = 14H10.2C9-hIgG4(S228P) CDRH3 Sequence
STPYEYDGAY

SEQ ID NO: 1801 - protein, 8 aa, synthetic construct
  REGION 1..8: note = 15G7.2A7-hIgG4(S228P) CDRH3 Sequence
TSGYGFPY

SEQ ID NO: 1802 - protein, 13 aa, synthetic construct
  REGION 1..13: note = MOPC21-hIgG4(S228P) CDRH3 Sequence
ARWGNYPYYAMDY

SEQ ID NO: 1803 - protein, 15 aa, synthetic construct
  REGION 1..15: note = 846.1H12-hIgG4(S228P) CDRH3 Sequence
ARWGGYAGDYYAMDY

SEQ ID NO: 1804 - protein, 15 aa, synthetic construct
  REGION 1..15: note = 846.2H3-hIgG4(S228P)CDRH3 Sequence
ARWGGYDGDYYAMDY

SEQ ID NO: 1805 - protein, 15 aa, synthetic construct
  REGION 1..15: note = 846.1F5-hIgG4(S228P)CDRH3 Sequence
ARWGGYDGDYYAMDY

SEQ ID NO: 1806 - protein, 15 aa, synthetic construct
  REGION 1..15: note = 846T.16B5-hIgG4(S228P) CDRH3 Sequence
ARWGGYDGDYYAMDY

SEQ ID NO: 1807 - protein, 8 aa, synthetic construct
  REGION 1..8: note = 20D11.2C6-hIgG4(S228P) CDRH3 Sequence
TSGYGFPY

SEQ ID NO: 1808 - protein, 9 aa, synthetic construct
  REGION 1..9: note = 15G7.2A7-hIgG4(S228P) CDRH3 Sequence
APYDNFFAY

SEQ ID NO: 1809 - protein, 12 aa, synthetic construct
  REGION 1..12: note = IMT001-4-HCLC (TB001) CDRH3 Sequence
AKFGNYVGAMDY

SEQ ID NO: 1810 - protein, 7 aa, synthetic construct
  REGION 1..7: note = 846T.14A2-hIgG4(S338P) CDRH3 Sequence
VRYTMDY

SEQ ID NO: 1811 - protein, 9 aa, synthetic construct
  REGION 1..9: note = 798-9.20H5.A3-mH1mL0-hIgG4(S228P) CDRH3 Sequence
ARGPYAMDY

SEQ ID NO: 1812 - protein, 7 aa, synthetic construct
  REGION 1..7: note = F847C.21H6-hIgG4(S228P) CDRH3 Sequence
ARGWFAY

SEQ ID NO: 1813 - protein, 10 aa, synthetic construct
  REGION 1..10: note = 798-9.19D9.2E5-hIgG4(S228P)-mV2 CDRH3 Sequence
ATPYEYDGAY

SEQ ID NO: 1814 - protein, 11 aa, synthetic construct
  REGION 1..11: note = 4A11-VH3-hIgG4(S228P)-VL1 (TB006) CDRL1 Sequence
QSLFHSDGKTY

SEQ ID NO: 1815 - protein, 11 aa, synthetic construct
  REGION 1..11: note = 13H12-VH3-hIgG4(S228P)-VL1 CDRL1 Sequence
KSLLHSDGITY

SEQ ID NO: 1816 - protein, 6 aa, synthetic construct
  REGION 1..6: note = 19B5-H1L1-hIgG4(S228P) CDRL1 Sequence
QGINNY

SEQ ID NO: 1817 - protein, 11 aa, synthetic construct
  REGION 1..11: note = 14H10.2C9-hIgG4(S228P) CDRL1 Sequence
QSLFDSDGKTY

SEQ ID NO: 1818 - protein, 6 aa, synthetic construct
  REGION 1..6: note = 15G7.2A7-hIgG4(S228P) CDRL1 Sequence
QNINIW

SEQ ID NO: 1819 - protein, 6 aa, synthetic construct
  REGION 1..6: note = MOPC21-hIgG4(S228P) CDRL1 Sequence
ENVVTY

SEQ ID NO: 1820 - protein, 12 aa, synthetic construct
  REGION 1..12: note = 846.1H12-hIgG4(S228P) CDRL1 Sequence
QSVLYSSSQKNY

SEQ ID NO: 1821 - protein, 12 aa, synthetic construct
  REGION 1..12: note = 846.2H3-hIgG4(S228P)CDRL1 Sequence
QSVLYSSNQKNY

SEQ ID NO: 1822 - protein, 12 aa, synthetic construct
  REGION 1..12: note = 846.1F5-hIgG4(S228P)CDRL1 Sequence
QSVLYSSNQKNY

SEQ ID NO: 1823 - protein, 12 aa, synthetic construct
  REGION 1..12: note = 846T.16B5-hIgG4(S228P) CDRL1 Sequence
QSVLYSSNQKNY

SEQ ID NO: 1824 - protein, 6 aa, synthetic construct
  REGION 1..6: note = 20D11.2C6-hIgG4(S228P) CDRL1 Sequence
QNIYIW

SEQ ID NO: 1825 - protein, 11 aa, synthetic construct
  REGION 1..11: note = 15G7.2A7-hIgG4(S228P) CDRL1 Sequence
KSLLYKDGKTY

SEQ ID NO: 1826 - protein, 6 aa, synthetic construct
  REGION 1..6: note = IMT001-4-HCLC (TB001) CDRL1 Sequence
QNINVW

SEQ ID NO: 1827 - protein, 9 aa, synthetic construct
  REGION 1..9: note = 846T.14A2-hIgG4(S338P) CDRL1 Sequence
TGAVTTSNY

SEQ ID NO: 1828 - protein, 6 aa, synthetic construct
  REGION 1..6: note = 798-9.20H5.A3-mH1mL0-hIgG4(S228P) CDRL1 Sequence
QDISNY

SEQ ID NO: 1829 - protein, 11 aa, synthetic construct
  REGION 1..11: note = F847C.21H6-hIgG4(S228P) CDRL1 Sequence
RSLLDSDGKTY

SEQ ID NO: 1830 - protein, 11 aa, synthetic construct
  REGION 1..11: note = 798-9.19D9.2E5-hIgG4(S228P)-mV2 CDRL1 Sequence
QSLLHSDGKTY

SEQ ID NO: 1831-1847 - skipped (17 entries)

SEQ ID NO: 1848 - protein, 9 aa, synthetic construct
  REGION 1..9: note = 4A11-VH3-hIgG4(S228P)-VL1 (TB006) CDRL3 Sequence
WQGTHFPLT

SEQ ID NO: 1849 - protein, 9 aa, synthetic construct
  REGION 1..9: note = 13H12-VH3-hIgG4(S228P)-VL1 CDRL3 Sequence
AQMLEFPLT

SEQ ID NO: 1850 - protein, 9 aa, synthetic construct
  REGION 1..9: note = 19B5-H1L1-hIgG4(S228P) CDRL3 Sequence
QQYSQVPYT

SEQ ID NO: 1851 - protein, 9 aa, synthetic construct
  REGION 1..9: note = 14H10.2C9-hIgG4(S228P) CDRL3 Sequence
WQGTHFPLT

SEQ ID NO: 1852 - protein, 9 aa, synthetic construct
  REGION 1..9: note = 15G7.2A7-hIgG4(S228P) CDRL3 Sequence
LQGQSYPLT

SEQ ID NO: 1853 - protein, 9 aa, synthetic construct
  REGION 1..9: note = MOPC21-hIgG4(S228P) CDRL3 Sequence
GQGYSYPYT

SEQ ID NO: 1854 - protein, 8 aa, synthetic construct
  REGION 1..8: note = 846.1H12-hIgG4(S228P) CDRL3 Sequence
HQYLSSLT

SEQ ID NO: 1855 - protein, 8 aa, synthetic construct
  REGION 1..8: note = 846.2H3-hIgG4(S228P)CDRL3 Sequence
HQYLSSLT

SEQ ID NO: 1856 - protein, 8 aa, synthetic construct
  REGION 1..8: note = 846.1F5-hIgG4(S228P) CDRL3 Sequence
HQYLSSLT

SEQ ID NO: 1857 - protein, 8 aa, synthetic construct
  REGION 1..8: note = 846T.16B5-hIgG4(S228P) CDRL3 Sequence
HQYLSSLT

SEQ ID NO: 1858 - protein, 9 aa, synthetic construct
  REGION 1..9: note = 20D11.2C6-hIgG4(S228P) CDRL3 Sequence
LQGQSYPLT

SEQ ID NO: 1859 - protein, 9 aa, synthetic construct
  REGION 1..9: note = 15G7.2A7-hIgG4(S228P) CDRL3 Sequence
QQLVDYPLT

SEQ ID NO: 1860 - protein, 9 aa, synthetic construct
  REGION 1..9: note = IMT001-4-HCLC (TB001) CDRL3 Sequence
QQGQSYPYT

SEQ ID NO: 1861 - protein, 9 aa, synthetic construct
  REGION 1..9: note = 846T.14A2-hIgG4(S338P) CDRL3 Sequence
ALWYSNHWV

SEQ ID NO: 1862 - protein, 9 aa, synthetic construct
  REGION 1..9: note = 798-9.20H5.A3-mH1mL0-hIgG4(S228P) CDRL3 Sequence
QQYSKLPYT

SEQ ID NO: 1863 - protein, 9 aa, synthetic construct
  REGION 1..9: note = F847C.21H6-hIgG4(S228P) CDRL3 Sequence
WQGTHFPQT

SEQ ID NO: 1864 - protein, 9 aa, synthetic construct
  REGION 1..9: note = 798-9.19D9.2E5-hIgG4(S228P)-mV2 CDRL3 Sequence
WQGTHFPLT

SEQ ID NO: 1865 - protein, 123 aa, synthetic construct
  REGION 1..123: note = 4A11-VH3-hIgG4(S228P)-VL1 (TB006) VH Sequence
QVQLVQSGSELKKPGASVKVSCKASGYTFTEYTIHWVRQAPGQGLEWMGWFYPGSDNINYNEGFTGRFVLSADKSVSTAYLQICSLKAEDTAVYFCARHEEGVITTVSYFDYWGQGTLVTVSS

SEQ ID NO: 1866 - protein, 123 aa, synthetic construct; identical to SEQ ID NO: 1865
  REGION 1..123: note = 13H12-VH3-hIgG4(S228P)-VL1 VH Sequence

SEQ ID NO: 1867 - protein, 116 aa, synthetic construct
  REGION 1..116: note = 19B5-H1L1-hIgG4(S228P) VH Sequence
QVQLVQSGSELKKPGASVKVSCKASGYTFTTYAMSWVRQAPGQGLEWMGWINTYSGVPTYADDFTGRFVFSLETSVSTAYLQISSLKAEDTAVYFCARGPYAMDYWGQGTLVTVSS

SEQ ID NO: 1868 - protein, 117 aa, synthetic construct; identical to SEQ ID NO: 301
  REGION 1..117: note = 14H10.2C9-hIgG4(S228P) VH Sequence

SEQ ID NO: 1869 - protein, 115 aa, synthetic construct; identical to SEQ ID NO: 318
  REGION 1..115: note = 15G7.2A7-hIgG4(S228P) VH Sequence

SEQ ID NO: 1870 - protein, 120 aa, synthetic construct
  REGION 1..120: note = MOPC21-hIgG4(S228P) VH Sequence
DVQLVESGGGLVQPGGSRKLSCAASGFTFSSFGMHWVRQAPEKGLEWVAYISSGSSTLHYADTVKGRFTISRDNPKNTLFLQMTSLRSEDTGMYYCARWGNYPYYAMDYWGQGTSVTVSS

SEQ ID NO: 1871 - protein, 122 aa, synthetic construct; identical to SEQ ID NO: 324
  REGION 1..122: note = 846.1H12-hIgG4(S228P) VH Sequence

SEQ ID NO: 1872 - protein, 122 aa, synthetic construct; identical to SEQ ID NO: 323
  REGION 1..122: note = 846.2H3-hIgG4(S228P)VH Sequence

SEQ ID NO: 1873 - protein, 122 aa, synthetic construct; identical to SEQ ID NO: 323
  REGION 1..122: note = 846.1F5-hIgG4(S228P)VH Sequence

SEQ ID NO: 1874 - protein, 122 aa, synthetic construct; identical to SEQ ID NO: 328
  REGION 1..122: note = 846T.16B5-hIgG4(S228P) VH Sequence

SEQ ID NO: 1875 - protein, 115 aa, synthetic construct; identical to SEQ ID NO: 304
  REGION 1..115: note = 20D11.2C6-hIgG4(S228P) VH Sequence

SEQ ID NO: 1876 - protein, 116 aa, synthetic construct; identical to SEQ ID NO: 297
  REGION 1..116: note = 15G7.2A7-hIgG4(S228P) VH Sequence

SEQ ID NO: 1877 - skipped

SEQ ID NO: 1878 - protein, 114 aa, synthetic construct; identical to SEQ ID NO: 326
  REGION 1..114: note = 846T.14A2-hIgG4(S338P) VH Sequence

SEQ ID NO: 1879 - protein, 116 aa, synthetic construct; identical to SEQ ID NO: 1070
  REGION 1..116: note = 798-9.20H5.A3-mH1mL0-hIgG4(S228P) VH Sequence

SEQ ID NO: 1880 - protein, 116 aa, synthetic construct; identical to SEQ ID NO: 1070
  REGION 1..116: note = F847C.21H6-hIgG4(S228P) VH Sequence

SEQ ID NO: 1881 - protein, 117 aa, synthetic construct; identical to SEQ ID NO: 319
  REGION 1..117: note = 798-9.19D9.2E5-hIgG4(S228P)-mV2 VH Sequence

SEQ ID NO: 1882 - protein, 112 aa, synthetic construct; identical to SEQ ID NO: 375
  REGION 1..112: note = 13H12-VH3-hIgG4(S228P)-VL1 VL Sequence

SEQ ID NO: 1883 - protein, 112 aa, synthetic construct
  REGION 1..112: note = 4A11-VH3-hIgG4(S228P)-VL1 (TB006) VL Sequence
DVVMTQSPLSLPVTLGQPASISCRSSQSLFHSDGKTYLNWLQQRPGQSPRRLIYLVSKRDSGVPDRFSGSGSGTDFTLKISRVEAEDVGVYYCWQGTHFPLTFGGGTKVEIK

SEQ ID NO: 1884 - protein, 107 aa, synthetic construct
  REGION 1..107: note = 19B5-H1L1-hIgG4(S228P) VL Sequence
DIQMTQSPSSLSASVGDRVTITCRASQGINNYLNWYQQKPGKVPKLLIYYASTLHSGVPSRFSGSGSGTDYTLTISSLQPEDVATYYCQQYSQVPYTFGQGTKLEIK

SEQ ID NO: 1885 - protein, 112 aa, synthetic construct; identical to SEQ ID NO: 378
  REGION 1..112: note = 14H10.2C9-hIgG4(S228P) VL Sequence

SEQ ID NO: 1886 - protein, 107 aa, synthetic construct
  REGION 1..107: note = 15G7.2A7-hIgG4(S228P) VL Sequence
DIQMNQSPSSLSASLGDTISITCRASQNINIWLSWYQQKPGNIPQLLIYKASNLHTGVPSRFSGSGSGTDFTLTISSLQPEDIATYYCLQGQSYPLTFGAGTKLVMK

SEQ ID NO: 1887 - protein, 107 aa, synthetic construct
  REGION 1..107: note = MOPC21-hIgG4(S228P) VL Sequence
NIVMTQSPKSMSMSVGERVTLTCKASENVVTYVSWYQQKPEQSPKLLIYGASNRYTGVPDRFTGSGSATDFTLTISSVQAEDLADYHCGQGYSYPYTFGGGTKLEIK

SEQ ID NO: 1888 - protein, 132 aa, synthetic construct
  REGION 1..132: note = 846.1H12-hIgG4(S228P) VL Sequence
METDTLLLWVLLLWVPGSTGNIMMTQSPSSLAVSAGQKVTMSCKSSQSVLYSSSQKNYLAWYQQKPGQSPKLLIYWASTRESGVPDRFSGSGSGTDFTLTISSVQPEDLAVYYCHQYLSSLTFGAGTKLELK

SEQ ID NO: 1889 - protein, 112 aa, synthetic construct; identical to SEQ ID NO: 401
  REGION 1..112: note = 846.2H3-hIgG4(S228P)VL Sequence

SEQ ID NO: 1890 - protein, 112 aa, synthetic construct; identical to SEQ ID NO: 400
  REGION 1..112: note = 846.1F5-hIgG4(S228P) VL Sequence

SEQ ID NO: 1891 - protein, 112 aa, synthetic construct; identical to SEQ ID NO: 405
  REGION 1..112: note = 846T.16B5-hIgG4(S228P) VL Sequence

SEQ ID NO: 1892 - protein, 107 aa, synthetic construct; identical to SEQ ID NO: 381
  REGION 1..107: note = 20D11.2C6-hIgG4(S228P) VL Sequence

SEQ ID NO: 1893 - protein, 112 aa, synthetic construct; identical to SEQ ID NO: 374
  REGION 1..112: note = 15G7.2A7-hIgG4(S228P) VL Sequence

SEQ ID NO: 1894 - protein, 112 aa, synthetic construct; identical to SEQ ID NO: 374
  REGION 1..112: note = IMT001-4-HCLC (TB001) VL Sequence

SEQ ID NO: 1895 - protein, 109 aa, synthetic construct; identical to SEQ ID NO: 403
  REGION 1..109: note = 846T.14A2-hIgG4(S338P) VL Sequence

SEQ ID NO: 1896 - protein, 107 aa, synthetic construct; identical to SEQ ID NO: 382
  REGION 1..107: note = 798-9.20H5.A3-mH1mL0-hIgG4(S228P) VL Sequence

SEQ ID NO: 1897 - protein, 112 aa, synthetic construct; identical to SEQ ID NO: 440
  REGION 1..112: note = F847C.21H6-hIgG4(S228P) VL Sequence

SEQ ID NO: 1898 - protein, 112 aa, synthetic construct
  REGION 1..112: note = 798-9.19D9.2E5-hIgG4(S228P)-mV2 VL Sequence
DALMTQTPLTLSVTIGQPASISCKSSQSLLHSDGKTYLNWLLQRPGQPPKRLMYLVSTLDSGVPDRFTGSGSGTDFTLKISRVEAEDLGVYYCWQGTHFPLTFGAGTKLELK

SEQ ID NO: 1899 - protein, 112 aa, synthetic construct; identical to SEQ ID NO: 1883
  REGION 1..112: note = 2-VH3-hIgG4(S228P)-VL1

SEQ ID NO: 1900 - protein, 112 aa, synthetic construct; identical to SEQ ID NO: 375
  REGION 1..112: note = 4A11-VH3-hIgG4(S228P)-VL1

SEQ ID NO: 1901 - protein, 107 aa, synthetic construct; identical to SEQ ID NO: 1884
  REGION 1..107: note = 19B5-H1L1-hIgG4(S228P)

SEQ ID NO: 1902 - protein, 112 aa, synthetic construct; identical to SEQ ID NO: 378

SEQ ID NO: 1903 - protein, 107 aa, synthetic construct; identical to SEQ ID NO: 1886
  REGION 1..107: note = 15G7.2A7-hIgG4(S228P)

SEQ ID NO: 1904 - protein, 107 aa, synthetic construct; identical to SEQ ID NO: 1887
  REGION 1..107: note = MOPC21-hIgG4(S228P) VL

SEQ ID NO: 1905 - protein, 132 aa, synthetic construct; identical to SEQ ID NO: 1888
  REGION 1..10: note = 846.1H12-hIgG4(S228P) VL

SEQ ID NO: 1906 - protein, 112 aa, synthetic construct; identical to SEQ ID NO: 401
  REGION 1..7: note = 846.2H3-hIgG4(S228P) Sister clone-IMTAB0201

SEQ ID NO: 1907 - protein, 112 aa, synthetic construct; identical to SEQ ID NO: 400
  REGION 1..12: note = 846.1F5-hIgG4(S228P) Sister clone- VL

SEQ ID NO: 1908 - protein, 112 aa, synthetic construct; identical to SEQ ID NO: 405
  REGION 1..5: note = 846T.16B5-hIgG4(S228P) VL

SEQ ID NO: 1909 - protein, 107 aa, synthetic construct; identical to SEQ ID NO: 381

SEQ ID NO: 1910 - protein, 112 aa, synthetic construct; identical to SEQ ID NO: 374
  REGION 1..9: note = IMT001-4-HCLC (TB001)

SEQ ID NO: 1911 - protein, 107 aa, synthetic construct; identical to SEQ ID NO: 409
  REGION 1..107: note = 847.12F12-hIgG4(S228P) VL

SEQ ID NO: 1912 - protein, 109 aa, synthetic construct; identical to SEQ ID NO: 403
  REGION 1..106: note = 846T.14A2-hIgG4(S338P) VL

SEQ ID NO: 1913 - protein, 107 aa, synthetic construct; identical to SEQ ID NO: 382
  REGION 1..107: note = 798-9.20H5.A3-mH1mL0-hIgG4(S228P) VL

SEQ ID NO: 1914 - protein, 112 aa, synthetic construct; identical to SEQ ID NO: 440

SEQ ID NO: 1915-1920 - skipped (6 entries)

SEQ ID NO: 1921 - protein, 112 aa, synthetic construct; identical to SEQ ID NO: 1898

SEQ ID NO: 1922 - protein, 24 aa, synthetic construct
MDPKGSLSWRILLFLSLAFELSYG

SEQ ID NO: 1923 - protein, 22 aa, synthetic construct
MDMRVPAQLLGLLLLWLRGARC

SEQ ID NO: 1924 - protein, 20 aa, synthetic construct
METDTLLLWVLLLWVPGSTG

SEQ ID NO: 1925 - DNA, 72 bp, synthetic construct
  source 1..72: mol_type = other DNA
atggatccgaaaggcagcctgagctggcgcattctgctgtttctgagcctggcgtttgaactgagctatggc

SEQ ID NO: 1926 - DNA, 66 bp, synthetic construct
  source 1..66: mol_type = other DNA
atggatatgcgcgtgccggcgcagctgctgggcctgctgctgctgtggctgcgcggcgcgcgctgc

SEQ ID NO: 1927 - DNA, 60 bp, synthetic construct
  source 1..60: mol_type = other DNA
atggaaaccgataccctgctgctgtgggtgctgctgctgtgggtgccgggcagcaccggc

1. A method of treating microglia mediated inflammation and/or one or more diseases associated with microglia mediated inflammation in a subject in need thereof, the method comprising:
identifying a subject as having or at risk of having microglia mediated inflammation and/or one or more symptoms of a disease associated with microglia mediated inflammation, and
administering a therapeutically effective amount of an anti-Gal3 antibody to the subject, wherein
administration of the antibody to the subject alleviates one or more symptoms of microglia mediated inflammation and/or one or more one or more symptoms of a disease associated with microglia mediated inflammation.

2. (canceled)

3. A method of treating an ocular surface disease in a subject in need thereof, the method comprising:
identifying a subject as having or at risk of having an ocular surface disease, and
administering a therapeutically effective amount of an anti-Gal3 antibody to the subject, wherein
administration of the antibody to the subject alleviates one or more symptoms of ocular surface disease.

4. A method of treating macular degeneration, age-related macular degeneration, age-related vascular dysfunction, diabetic retinopathy, and/or retinal drusen, in a subject in need thereof, the method comprising:
identifying a subject as having or at risk of having macular degeneration, age-related macular degeneration, age-related vascular dysfunction, diabetic retinopathy, and/or retinal drusen, and
administering a therapeutically effective amount of an anti-Gal3 antibody to the subject, wherein
administration of the antibody to the subject alleviates one or more symptoms of macular degeneration, age-related macular degeneration, age-related vascular dysfunction, diabetic retinopathy, and/or retinal drusen.

5-8. (canceled)

9. A method of treating cataracts in a subject in need thereof, the method comprising:
identifying a subject as having or at risk of having cataracts, and
administering a therapeutically effective amount of an anti-Gal3 antibody to the subject, wherein
administration of the antibody to the subject reduces the severity of the subject's cataracts as compared to the severity of cataracts in the subjects prior to administration of the anti-Gal3 antibody.

10-12. (canceled)

13. The method of claim 4, wherein the anti-Gal3 antibody is administered intravenously or topically.

14. The method of claim 3, wherein the one or more symptoms comprise dryness of the eye, foreign body sensation, burning sensation, itching, photophobia, eye redness, blurred vision, fluctuating vision, visual fatigue, corneal sensitivity, decreased tear formation, or any combination thereof.

15. The method of claim 3, wherein the ocular surface disease comprises age-related vascular dysfunction, angiogenesis, inflammation, and oxidative stress.

16-19. (canceled)

20. The method of claim 4, wherein the anti-Gal3 antibody is administered, daily, twice daily, weekly, bi-weekly, and/or monthly.

21. The method of claim 20, wherein the anti-Gal3 antibody is administered for up to about 1, 2, 3, 4, 5, 6, 7, 8, 9, 10, 11, or 12 weeks, or for an amount of time that is in a range defined by any two of the preceding values.

22. The method of claim 21, wherein the anti-Gal3 antibody is topically administered to the subject's eye twice daily for 14 days.

23. The method of claim 22, wherein 10 mg/kg of anti-Gal3 antibody is topically administered to the subject's eye.

24. (canceled)

25. The method of claim 4, wherein the antibody comprises (1) a heavy chain variable region comprising a V_{H}-CDR1, a V_{H}-CDR2, and a V_{H}-CDR3; and (2) a light chain variable region comprising a V_{L}-CDR1, a V_{L}-CDR2, and a V_{L}-CDR3, wherein
the antibody comprises at least 1 V_{L}-CDR having at least 90% identity to any one of the amino acid sequences of SEQ ID NOs: 170-296, 1814-1864.

26. The method of claim 4, wherein the antibody comprises (1) a heavy chain variable region comprising a V_{H}-CDR1, a V_{H}-CDR2, and a V_{H}-CDR3; and (2) a light chain variable region comprising a V_{L}-CDR1, a V_{L}-CDR2, and a V_{L}-CDR3, wherein
the antibody comprises at least 1 V_{H}-CDR having at least 90% identity to any one of the amino acid sequences of SEQ ID NOs: 27-169, 801, 802, 953, 954, 1763-1813.

27. The method of claim 4, wherein the antibody comprises at least 1 CDR having at least 90% identity to any one of the amino acid sequences of SEQ ID Nos: 27-296, 801, 802, 953, 954, 1763-1813.

28. The method of claim 4, wherein the antibody comprises at least 6 CDRs having at least 90% identity to any one of the amino acid sequences of SEQ ID NOs: 27-296, 801, 802, 953, 954, 1763-1864.

29. The method of claim 4, wherein the antibody comprises (1) a heavy chain variable region comprising a V_{H}-CDR1, a V_{H}-CDR2, and a V_{H}-CDR3; and (2) a light chain variable region comprising a V_{L}-CDR1, a V_{L}-CDR2, and a V_{L}-CDR3, wherein
the V_{H}-CDR1 comprises an amino acid sequence having at least 90% identity to any one of the amino acid sequences of SEQ ID NOs: 27-70, 1763-1779;
the V_{H}-CDR2 comprises an amino acid sequence having at least 90% identity to any one of the amino acid sequences of SEQ ID NOs: 71-111, 801, 951, 952, 1780-1796;
the V_{H}-CDR3 comprises an amino acid sequence having at least 90% identity to any one of the amino acid sequences of SEQ ID NO: 112-169, 802, 953, 954, 1797-1813;
the V_{L}-CDR1 comprises an amino acid sequence having at least 90% identity to any one of the amino acid sequences of SEQ ID NOs: 170-220, 1814-1830;
the V_{L}-CDR2 comprises an amino acid sequence having at least 90% identity to any one of the amino acid sequences of SEQ ID NOs: 221-247, 1831-1847; and
the V_{L}-CDR3 comprises an amino acid sequence having at least 90% identity to any one of the amino acid sequences of SEQ ID NOs: 248-296, 1848-1864.

30. The method of claim 4, wherein the heavy chain variable region comprises a sequence having at least 90% identity to the sequence selected from SEQ ID NOs: 297-373, 803, 806-820, 940, 955-968, 1067-1109, 1415-1439, 1882-1898.

31. The method of claim 4, wherein the light chain variable region comprises a sequence having at least 90% identity to the sequence selected from SEQ ID NOs: 374-447, 821-835, 941-943, 969-982, 1110-1152, 1440-1464, 1898-1914, 1921.

32. The method of claim 4, wherein the antibody comprises a heavy chain, wherein the heavy chain comprises a sequence having at least 90% identity to the sequence selected from SEQ ID Nos: 448-494, 804, 836-850, 983-996, 1153-1195, 1411, 1465-1489, 1695-1711.

33. The method of claim 4, wherein the antibody comprises a light chain, wherein the light chain comprises a sequence having at least 90% identity to the sequence selected from SEQ ID Nos: 495-538, 805, 851-865, 997-1010, 1196-1238, 1412, 1490-1514, 1746-1762.

34. The method of claim 4, wherein the antibody comprises (1) a heavy chain variable region comprising a V_{H}-CDR1, a V_{H}-CDR2, and a V_{H}-CDR3; and (2) a light chain variable region comprising a V_{L}-CDR1, a V_{L}-CDR2, and a V_{L}-CDR3, wherein
the V_{H}-CDR1 comprises an amino acid sequence having at least 90% identity to SEQ ID NO: 27;
the V_{H}-CDR2 comprises an amino acid sequence having at least 90% identity to SEQ ID NO: 71;
the V_{H}-CDR3 comprises an amino acid sequence having at least 90% identity to SEQ ID NO: 112;
the V_{H}-CDR1 comprises an amino acid sequence having at least 90% identity to SEQ ID NO: 170;
the V_{H}-CDR1 comprises an amino acid sequence having at least 90% identity to SEQ ID NO: 221; and
the V_{H}-CDR1 comprises an amino acid sequence having at least 90%, to SEQ ID NO: 248.

35. The method of claim 4, wherein the antibody comprises (1) a heavy chain variable region comprising a V_{H}-CDR1, a V_{H}-CDR2, and a V_{H}-CDR3; and (2) a light chain variable region comprising a V_{L}-CDR1, a V_{L}-CDR2, and a V_{L}-CDR3, wherein
the antibody comprises at least 3 V_{H}-CDRs having at least 90% identity to any one of the amino acid sequences of SEQ ID Nos: 27, 71, 112.

36. The method of claim 4, wherein the antibody comprises (1) a heavy chain variable region comprising a V_{H}-CDR1, a V_{H}-CDR2, and a V_{H}-CDR3; and (2) a light chain variable region comprising a V_{L}-CDR1, a V_{L}-CDR2, and a V_{L}-CDR3, wherein
the antibody comprises at least 3 V_{H}-CDRs having at least 90% identity to any one of the amino acid sequences of SEQ ID Nos: 170, 221, 248.

37. The method of claim 4, wherein the heavy chain variable region comprises a sequence having at least 90% identity to SEQ ID NO: 297.

38. The method of claim 4, wherein the heavy chain variable region comprises a sequence having at least 90% identity to SEQ ID NO: 374.

39. The method of claim 4, wherein the antibody comprises a heavy chain, wherein the heavy chain comprises a sequence having at least 90% identity to the SEQ ID NO: 448.

40. The method of claim 4, wherein the antibody comprises a light chain, wherein the light chain comprises a sequence having at least 90% identity to SEQ ID NO: 495.

41. (canceled)

42. (canceled)

43. The method of claim 3, wherein the ocular surface disease is selected from dry eye disease (DED), blepharitis, neurotrophic keratitis, ocular rosacea, meibomian gland dysfunction, decreased tear quality and/or production with age, chemical or thermal burns, side effects of medical treatments or prescription medications, conjunctivitis, Sjogren's disease, allergies and other immunological conditions, and any combinations thereof.
